(19) United States
(12) Patent Application Publication
(10) Pub. No.: US 2009/0136917 A1
(43) Pub. Date: May 28, 2009

(54) Systems and methods for viral therapy

(76) Inventors: Aladar A. Szalay, Highland, CA (US); Yong A. Yu, San Diego, CA (US); Nanhai Chen, San Diego, CA (US); Alexa Frentzen, San Diego, CA (US); Qian Zhang, San Diego, CA (US)

Correspondence Address: K&L Gates LLP, 3580 Carmel Mountain Road, Suite 200, San Diego, CA, 92130, US

(21) Appl. No.: 12/288,887

(22) Filed: Oct. 24, 2008

Related U.S. Application Data
(60) Provisional application No. 61/000,602, filed on Oct. 25, 2007.
(60) Provisional application No. 61/003,275, filed on Nov. 14, 2007.
(60) Provisional application No. 61/057,191, filed on May 29, 2008.

(51) Int. Cl. C12Q 1/70; A61K 35/76; C12N 7/01; G01N 33/68

(52) U.S. Cl. 435/5; 424/93.2; 435/235.1; 436/86

(57) ABSTRACT

Diagnostic methods and compositions associated with viral therapy are provided. In particular, methods, compositions, and kits to measure markers and therapeutic indicator predictive of viral efficacy in antitumor therapy are provided. Therapeutic viruses and combinations and kits for use in the practicing the methods also are provided.

### RELATED APPLICATIONS

[0001] Benefit of priority is claimed under 35 U.S.C. §119(e) to U.S. Provisional Application Ser. No. 61/000,602, to Nanhai Chen, Yong A. Yu and Aladar A. Szalay, filed on Oct. 25, 2007, entitled “SYSTEMS AND METHODS FOR VIRAL THERAPY,” to U.S. Provisional Application Ser. No. 61/003,275, to Nanhai Chen, Yong A. Yu and Aladar A. Szalay, filed on Nov. 14, 2007, entitled “SYSTEMS AND METHODS FOR VIRAL THERAPY,” and to U.S. Provisional Application Ser. No. 61/057,191, to Yong A. Yu Nanhai Chen, Alexa Frentzen and Aladar A. Szalay, filed on May 29, 2008, entitled “SYSTEMS AND METHODS FOR VIRAL THERAPY.” The subject matter of each of these applications is incorporated by reference in its entirety.

[0002] This application is related to International Application No. (Attorney Dkt. No. 0119356-145/117PC) to Aladar A. Szalay, Yong A. Yu, Nanhai Chen and Alexa Frentzen filed on Oct. 25, 2008, entitled “SYSTEMS AND METHODS FOR VIRAL THERAPY,” which also claims priority to U.S. Provisional Application Ser. No. 61/000,602, U.S. Provisional Application Ser. No. 61/003,275, and to U.S. Provisional Application Ser. No. 61/057,191.

[0003] This application is related to U.S. application Ser. No. 11/975,088, filed on Oct. 16, 2007, entitled “METHODS FOR ATTENUATING VIRUS STRAINS FOR DIAGNOSTIC AND THERAPEUTIC USES,” to U.S. application Ser. No. 11/975,090, filed on Oct. 16, 2007, entitled “MODIFIED VACCINIA VIRUS STRAINS FOR USE IN DIAGNOSTIC AND THERAPEUTIC METHODS,” to U.S. application Ser. No. 12/080,766, filed on Apr. 4, 2008, entitled “METHODS FOR ATTENUATING VIRUS STRAINS FOR DIAGNOSTIC AND THERAPEUTIC USES,” and to International Application No. PCT/US2007/022172, filed on Oct. 16, 2007, entitled “MODIFIED VACCINIA VIRUS STRAINS FOR USE IN DIAGNOSTIC AND THERAPEUTIC METHODS.”

[0004] This application also is related to U.S. application Ser. No. 12/157,960 to Nanhai Chen, Yuman Fong, Aladar A. Szalay, Yong A. Yu and Qian Zhang, filed on Jun. 13, 2008, entitled “MICROORGANISMS FOR IMAGING AND/OR TREATMENT OF TUMORS” and to International Application No. PCT/US2008/007377 to Nanhai Chen, Yuman Fong, Aladar A. Szalay, Yong A. Yu and Qian Zhang, filed on Jun. 13, 2008, entitled “MICROORGANISMS FOR IMAGING AND/OR TREATMENT OF TUMORS.”

[0005] This application is related to U.S. application Ser. No. 10/872,156, to Aladar A. Szalay, Tatyana Timiryasova, Yong A. Yu and Qian Zhang, filed on Jun. 18, 2004, entitled “MICROORGANISMS FOR THERAPY,” which claims the benefit of priority under 35 U.S.C. §119(a) to each of EP Application No. 03 013 826.7, filed 18 Jun. 2003, entitled “Recombinant vaccinia viruses useful as tumor-specific delivery vehicle for cancer gene therapy and vaccination,” EP Application No. 03 018 478.2, filed 14 Aug. 2003, entitled “Method for the production of a polypeptide, RNA or other compound in tumor tissue,” and EP Application No. 03 024 283.8, filed 22 Oct. 2003, entitled “Use of a Microorganism or Cell to Induce Autoimmunization of an Organism Against a Tumor.” This application also is related to International Application No. PCT/US04/19866, filed on Jun. 18, 2004, entitled “MICROORGANISMS. FOR THERAPY.”

[0006] This application also is related to U.S. application Ser. No. 10/866,606, filed Jun. 10, 2004, entitled “Light emitting microorganisms and cells for diagnosis and therapy of tumors,” which is a continuation of U.S. application Ser. No. 10/189,918, filed Jul. 3, 2002, entitled “Light emitting microorganisms and cells for diagnosis and therapy of tumors.” This application also is related to International PCT Application PCT/IB02/04767, filed Jul. 31, 2002, entitled “Microorganisms and Cells for Diagnosis and Therapy of Tumors,” EP Application No. 01 118 417.3, filed Jul. 31, 2001, entitled “Light-emitting microorganisms and cells for tumor diagnosis/therapy,” EP Application No. 01 125 911.6, filed Oct. 30, 2001, entitled “Light emitting microorganisms and cells for diagnosis and therapy of tumors” and EP Application No. 02 0794 632.6, filed Jan. 28, 2004, entitled “Microorganisms and Cells for Diagnosis and Therapy of Tumors.”

[0007] The subject matter of each of the above-referenced applications is incorporated by reference in its entirety.

### INCORPORATION BY REFERENCE OF SEQUENCE LISTING PROVIDED ON COMPACT DISCS

[0008] An electronic version on compact disc (CD-R) of the Sequence Listing is filed herewith in duplicate (labeled Copy # 1 and Copy # 2), the contents of which are incorporated by reference in their entirety. The computer-readable file on each of the aforementioned compact discs, created on Oct. 24, 2008 is identical, 1540 kilobytes in size, and titled 117seq.txt.

### FIELD OF INVENTION

[0009] Diagnostic methods for assaying the efficacy of therapeutic viruses in vitro for the treatment of cancer and methods for identifying therapeutic viruses are provided. Combinations and kits for use in the practicing the methods are provided.

### BACKGROUND

[0010] Current standard cancer therapies include surgery, chemotherapy, radiation, and autologous cell transplantation. Surgery is generally effective in the early treatment of cancer; however, metastatic growth of tumors can prevent any complete cure. Chemotherapy, which involves administration of compounds having antitumor activity, while effective in the treatment of some cancers, is often accompanied by severe side effects, including nausea and vomiting, bone marrow depression, renal damage, and central nervous system depression. Radiation therapy has also been used to target cancer cells, as cancer cells are less able to repair themselves after treatment with radiation. However, radiation cannot be used to treat many cancers because of the sensitivity of normal cells which surround cancerous tissue.

[0011] Viral therapy provides an additional tool to treat cancer. Approaches to viral therapy are at least twofold. A first approach includes the use of non-destructive viruses to introduce genes into cells. In this approach, genes can express an enzyme such as thymidine kinase that the cells do not otherwise express. The rationale of this type of therapy is to selectively provide tumor cells with an enzymatic activity that is lacking or is much lower in the normal cells and which renders the tumor cells sensitive to certain drugs. Another approach to viral therapy to treat cancerous cells involves direct inoculation of tumor with attenuated viruses. Attenuated viruses can exhibit a reduced virulence yet are able to actively multiply and may ultimately cause the destruction of infected cells.

[0012] There remains a need to assess whether viral therapy will be successful in treating a given subject and to develop additional effective vectors for use in viral therapy.

### SUMMARY

[0013] Provided are methods for predicting the efficacy of a particular therapeutic virus for treatment of a particular tumor. As described herein, therapeutic viruses, such as oncolytic viruses, often are effective against one type of tumor (a responder), but not against another (a non-responder). A responder is a tumor cell that is susceptible to treatment with the virus and a non-responder is a tumor cell the is resistant to treatment with the virus.

[0014] Methods are provided herein for predicting for which viruses a tumor will be a responder. This permits, for example, selection of an appropriate viral therapy. As shown herein, while many viruses replicate in the tumor, those that will be not be effective for a particular tumor type, exhibit a delay in replication. Hence, the level of replication early after introduction or administration of a virus to a tumor, is an indicator of the viruses efficacy for a particular tumor. Also provided herein, are tumor cell markers, such as housekeeping genes, whose expression decreases upon viral infection and are indicative of non-delayed replication. In addition, as shown herein, the presence or absence of certain host cell makers also can indicate efficacy of therapeutic virus for a particular tumor. To assess such markers or measure viral replication, levels can be compared to suitable to controls or to standards or to pre-determined values.

[0015] In particular, provided are methods for predicting efficacy of viral therapy for a tumor. Such methods include the steps of:

[0016] determining a replication indicator indicative of the level or amount of viral replication within a predetermined period of time or as a function of time after introduction of the a therapeutic virus into tumor cells; and

[0017] determining if replication is delayed, wherein if replication is not delayed, selecting the virus as a candidate therapeutic virus for treatment of the tumor in a subject.

[0018] For example, delayed replication can be assessed by:

[0019] infecting a cell culture with a therapeutic virus, wherein the cell culture contains cells from a tumor;

[0020] after a predetermined time, determining a replication indicator of replication of the virus in the culture; and

[0021] based on the value of the replication indicator, predicting a therapeutic efficacy of the virus against the tumor.

[0022] Viral replication can be assessed in appropriate tumor cells, including, but not limited to, tissue cultured tumor cells or cells from a tumor biopsy or body fluid containing tumor cells.

[0023] Therapeutic viruses include any therapeutic viruses known to those of skill in the art, including viruses, such as adenoviruses, herpesviruses and pox viruses, such as vaccinia viruses. Often the virus is an oncolytic virus, which optionally expresses a therapeutic product and/or detectable markers or other appropriate product. Exemplified herein are vaccinia viruses of the strain LIVP, such as the virus that contains inactivated, such as by insertion of heterologous nucleic acid, in the HA, F3 and F14.5 genes/loci. Exemplary of such viruses is the strain designated GLV-1h68, which optionally can be modified to express additional heterologous nucleic acid molecules (in place of or in addition to the inserted heterologous nucleic acid in GLV-1h68.

[0024] The replication indicator that is measured is any parameter from which the level or amount or relative amount of viral replication, typically within a day of administration to the tumor cells, can be assessed or inferred. For example, replication can be determined by infecting or introducing the test virus into a tumor cell and assessing viral titer at a particular time or as a function of time. This can be compared to a predetermined standard or compared to other test candidates. Those the replicate relatively early, typically within about or zero to 10 days, about or zero to 5 days, about or zero to 3 days about or zero to 2 days, about or zero to 1 day, such as within two days or one day or 10 to 24 hours or 5 to 10 or 20 hours, are candidate therapeutic viruses. The particular time value to select can be empirically determined if necessary. Thus, the replication indicator can be determined and, for example, can be compared to a standard indicative of delayed replication or non-delayed replication. The standard can be pre-determined, such as a database of values of the indicator that represent non-delayed replication. Thus, for example, the replication indicator can be compared to a database of predetermined values for tumor cell types to determine whether the replication indicator has a value indicative of non-delayed replication.

[0025] In another embodiment, a tumor cell is identified as responsive to virus therapy by: obtaining a first set of values, each of the first set of values corresponding to a first parameter indicative of in vivo therapeutic effect of a virus on a cancerous cell line;

[0026] obtaining a second set of values, each of the second set of values corresponding to a second parameter indicative of a replication property of the virus in the cell line; and

[0027] categorizing the cancerous cell lines into two or more groups based at least in part on the first and second sets of values, the two or more groups representative of likely responses of respective cell lines to the virus.

[0028] Replication indicators, include but are not limited to one or more of:

[0029] (i) an increase in expression of a viral gene or a heterologous gene encoded by the virus, wherein an increase in expression is indicative that the tumor cells are responsive to virus therapy;

[0030] (ii) a decrease in expression of a housekeeping gene expressed in the tumor upon viral expression, wherein a decrease in expression is indicative that the tumor cells are responsive to virus therapy; or

[0031] (iii) a change in expression of a gene expressed by the tumor cells, wherein a change in expression is indicative that the tumor cells are responsive to virus therapy

[0032] Typically, when gene expression in the tumor cells is assessed, expression of a plurality of such genes, such as housekeeping genes whose expression decreases in tumor cells that are responders, are assessed. Hence panels of genes can be assessed, such as by reacting a nucleic acid sample, with an array (or high density microarray) containing nucleic acid encoding sufficient portions of a plurality of genes to detect expression. In some embodiments, patterns of expression can be detected and correlated with a responder/non-responder phenotype. Genes that can be assessed include expression of one or more genes encoding a protein selected from among IL-18 (Interleukin-18), MCP-5 (Monocyte Chemoattractant Protein-5; CCL12), IL-11 (Interleukin-11), MCP-1 (Monocyte Chemoattractant Protein-1), MPO (Myeloperoxidase), Apo A1 (Apolipoprotein A1), TIMP-1 (Tissue Inhibitor of Metalloproteinase Type-1), CRP (C Reactive Protein), Fibrinogen, MMP-9 (Matrix Metalloproteinase-9), Eotaxin (CCL11), GCP-2 (Granulocyte Chemotactic Protein-2; CXCL6), IL-6 (Interleukin-6), Tissue Factor (TF), SAP (Serum Amyloid P), FGF-basic (Fibroblast Growth Factor-basic), MCP-3 (Monocyte Chemoattractant Protein-3; CCL7), IP-10 (CXCL 10), MIP-2, Thrombopoetin, Cancer antigen 125, CD40, CD40 ligand, ENA-78, Ferritin, IL-12p40, IL-12p70, IL-16, MMP-2, PAI-1, TNF RII, TNF-beta and VCAM-1 indicates that the tumor cells are responsive to virus therapy.

[0033] Increases in expression of housekeeping genes or panels, such as arrays of probes, for detecting expression of housekeeping genes in a tumor cell following introduction of a virus can be assess, such as a function of time, indicate that a tumor is a non-responder. Housekeeping genes, include genes encoding proteins, such as actin, various ribosomal proteins are well known (see, e.g., the article “Human Housekeeping genes are compact” (2003) Trends in Genetics 19:362-365). For example, increases in gene expression of one or more genes encoding a protein selected from among MIP-1beta (Macrophage Inflammatory Protein-1beta), MDC (Macrophage-Derived Chemokine; CCL22), MIP-1alpha (Macrophage Inflammatory Protein-1alpha; CCL3), KC/GROalpha (Melanoma Growth Stimulatory Activity Protein), VEGF (Vascular Endothelial Cell Growth Factor), Endothelin-1, MIP-3 beta (Macrophage Inflammatory Protein-3 beta; Exodus-3 or ELC), Beta-2 microglobulin, IL-5 (Interleukin-5), IL-1 alpha (Interleukin-1 alpha), EGF (Epidermal Growth Factor), Lymphotactin (XCL1), GM-CSF (Granulocyte Macrophage-Colony Stimulating Factor), MIP-1 gamma (Macrophage Inflammatory Protein-1gamma; CCL4), IL-1beta (Interleukin-1 beta), Brain-derived neutrophic factor, Cancer antigen 19-9, Carcinoembryonic antigen, C reactive protein, EGF, Fatty acid binding protein, Factor VII, Growth hormone, IL-1 alpha, IL-1 beta, IL-1 ra, IL-7, IL-8, MDC, Prostatic acid phosphatase, Prostate specific antigen, free, Stem cell factor, Tissue factor, TNF-alpha, VEGF and Von Willebrand factor, indicates that the tumor cells are not responsive to virus therapy.

[0034] In all of the methods, the virus can be modified to include a gene that encodes a protein whose expression is increased in responders compared to non-responders or encodes a gene product that reduces expression of a protein whose level of expression is increased in non-responders compared to responders. Those genes whose expression improves response to the virus can be included in the therapeutic virus to improve therapeutic efficacy.

[0035] As noted, a responder is a tumor cell that is susceptible to treatment with the virus and a non-responder is a tumor cell the is resistant to treatment with the virus.

[0036] Also provided are methods for improving or increasing the therapeutic efficacy of a therapeutic virus for a particular tumor or tumor type. This can be achieved by including in the virus nucleic acid that encodes a protein whose expression is increased in responders compared to non-responders or encodes a gene product that reduces expression of a protein whose level of expression is increased in non-responders compared to responders, wherein a responder is a tumor that is susceptible to treatment with the virus and a non-responder is a tumor the is resistant to treatment with the virus.

[0037] Also provided are methods of viral therapy and/or uses of the viruses for treatment or formulation of a medicament, where the therapeutic virus encodes a protein whose expression is increased in responders compared to non-responders or encodes a gene product that reduces expression of a protein whose level of expression is increased in non-responders compared to responders, wherein a responder is a tumor that is susceptible to treatment with the virus and a non-responder is a tumor the is resistant to treatment with the virus. Such viruses and methods and uses can be employed for treatment of subjects with non-responder tumor. The gene product encoded by the virus can be RNA, such as siRNA, or antisense nucleic acid or a ribozyme. Other products that can be expressed by the virus include therapeutic proteins, including, for example, one or more of TIMP-1, TIMP-2, TIMP-3, MCP-1, and IP-10. The therapeutic viruses include any such virus, including vaccinia virus, such as an LIVP virus, such as a GLV-1h68 modified to express a therapeutic product. Exemplary of such viruses are any selected from among GLV-1h103, GLV-1h119, GLV-1h120 or GLV-1h121. For all methods described herein, the therapeutic viruses include any suitable therapeutic virus, including oncolytic viruses and any discussed herein or known to those of skill in the art.

[0038] The therapeutic viruses can be provided as pharmaceutical compositions. Such compositions can additionally contain another therapeutic agent or can be administered in conjunction with a another agent. In particular, the therapeutic viruses can be used a part of a combination anti-cancer protocol. Combination therapies include co-administration or sequential or intermittent administration of viral therapy and chemotherapeutic compounds or other anti-cancer therapies, such as radiation and surgery. Examplar chemotherapeutic compounds include, but are not limited to, platinum; platinum analogs anthracenediones; vinblastine; alkylating agents; alkyl sulfonates; aziridines; ethylenimines and methylamelamines; nitrosureas; antibiotics; anti-metabolites; folic acid analogues; androgens; anti-adrenals; folic acid replenisher; aminolevulinic acid; amsacrine; bestrabucil; bisantrene; edatraxate; defofamine; demecolcine; diaziquone; elformithine; elliptinium acetate; etoglucid; gallium nitrate; substituted ureas; hydroxyurea; lentinan; lonidamine; mitoguazone; mitoxantrone; mopidamol; nitracrine; pentostatin; phenamet; pirarubicin; podophyllinic acid; 2-ethylhydrazide; procarbazine; anti-cancer polysaccharides; polysaccharide-K; razoxane; sizofiran; spirogermanium; tenuazonic acid; triaziquone; 2,2′,2″-trichlorotriethylamine; urethan; vindesine; dacarbazine; mannomustine; mitobronitol; mitolactol; pipobroman; gacytosine; cytosine arabinoside; cyclophosphamide; thiotepa; taxoids, such as paclitaxel and doxetaxel; chlorambucil; gemcitabine; 6-thioguanine; mercaptopurine; methotrexate; etoposide (VP-16); ifosfamide; mitomycin C; vincristine; vinorelbine; navelbine; novantrone; teniposide; daunomycin; aminopterin; xeloda; ibandronate; CPT11; topoisomerase inhibitor RFS 2000; difluoromethylomithine (DMFO); retinoic acid; esperamicins; capecitabine; methylhydrazine derivatives; and pharmaceutically acceptable salts, acids or derivatives of any of the above. Chemotherapeutic compounds also include, but are not limited to, adriamycin, non-sugar containing chloroethylnitrosoureas, 5-fluorouracil, bleomycin, doxorubicin, taxol, fragyline, Meglamine GLA, valrubicin, carmustaine and poliferposan, MM1270, BAY 12-9566, RAS farnesyl transferase inhibitor, farnesyl transferase inhibitor, MMP, MTA/LY231514, LY264618/Lometexol, Glamolec, CI-994, TNP-470, Hycamtin/Topotecan, PKC412, Valspodar/PSC833, Novantrone/Mitroxantrone, Metaret/Suramin, Batimastat, E7070, BCH-4556, CS-682, 9-AC, AG3340, AG3433, Incel/VX-710, VX-853, ZDO101, IS1641, ODN 698, TA 2516/Marmistat, BB2516/Marmistat, CDP 845, D2163, PD183805, DX8951f, Lemonal DP 2202, FK 317, Picibanil/OK-432, AD 32/Valrubicin, Metastron/strontium derivative, Temodal/Temozolomide, Evacet/liposomal doxorubicin, Yewtaxan/Placlitaxel, Taxol®/Paclitaxel, Xeload/Capecitabine, Furtulon/Doxifluridine, Cyclopax/oral paclitaxel, Oral Taxoid, SPU-077/Cisplatin, HMR 1275/Flavopiridol, CP-358 (774)/EGFR, CP-609 (754)/RAS oncogene inhibitor, BMS-182751/oral platinum, UFT (Tegafur/Uracil), Ergamisol/Levamisole, Eniluracil/776C85/5FU enhancer, Campto/Levamisole, Camptosar/Irinotecan, Tumodex/Ralitrexed, Leustatin/Cladribine, Paxex/Paclitaxel, Doxil/liposomal doxorubicin, Caelyx/liposomal doxorubicin, Fludara/Fludarabine, Pharmarubicin/Epirubicin, DepoCyt, ZD1839, LU 795533/Bis-Naphtalimide, LU 103793/Dolastain, Caetyx/liposomal doxorubicin, Gemzar/Gemcitabine, ZD 0473/Anormed, YM 116, Iodine seeds, CDK4 and CDK2 inhibitors, PARP inhibitors, D4809/Dexifosamide, Ifes/Mesnex/Ifosamide, Vumon®/Teniposide, Paraplatin/Carboplatin, Plantinol/cisplatin, Vepeside/Etoposide, ZD 9331, Taxotere/Docetaxel, prodrug of guanine arabinoside, Taxane Analog, nitrosoureas, alkylating agents such as melphelan and cyclophosphamide, Aminoglutethimide, Anastrozole, Asparaginase, Busulfan, Carboplatin, Chlorombucil, Cladribine, Cytarabine HCl, Dactinomycin, Daunorubicin HCl, Denileukin diftitox, Estramustine phosphate sodium, Etoposide (VP16-213), Exemestane, Floxuridine, Fluorouracil (5-FU®), Flutamide, Hydroxyurea (hydroxycarbamide), Ifosfamide, Interferon Alfa-2a, Interferon Alfa-2b, Interferon Gamma-1b, Letrozole, Leuprolide acetate (LHRH-releasing factor analogue), Lomustine (CCNU), Mechlorethamine HCl (nitrogen mustard), Megestrol, Mercaptopurine, Mesna, Mitotane (o.p′-DDD), Mitoxantrone HCl, Octreotide, Pegaspargase, Plicamycin, Procarbazine HCl, Streptozocin, Tamoxifen citrate, Thioguanine, Thiotepa, Tretinoin, Vinblastine sulfate, Amsacrine (m-AMSA), Azacitidine, Erythropoietin, Hexamethylmelamine (HMM), Interleukin 2, Mitoguazone (methyl-GAG; methyl glyoxal bis-guanylhydrazone; MGBG), Pentostatin (2′deoxycoformycin), Semustine (methyl-CCNU), Teniposide (VM-26®), Vindesine sulfate, Altretamine, Carmustine, Estramustine, Gemtuzumab ozogamicin, Idarubicin, Ifosphamide, Isotretinoin, Leuprolide, Melphalan, Testolactone, Uracil mustard, and the like. Also included in this definition are anti-hormonal agents that act to regulate or inhibit hormone action on tumors such as anti-estrogens, adrenocortical suppressants, antiandrogens and pharmaceutically acceptable salts, acids or derivatives of any of the above. Such chemotherapeutic compounds that can be used herein include compounds whose toxicities preclude use of the compound in general systemic chemotherapeutic methods.

[0039] In another embodiment, methods for assessing or predicting efficacy of particular virus for therapy of a particular tumor are provided. These methods include: determining the level of expression of at least one marker that is increased or decreased in a responder compared a non-responder in the absence of virus treatment; and based on the level of expression of the marker, predicting a therapeutic effect of the virus against the tumor. In other embodiments a plurality of such markers can be assessed. Such markers include, one or more or combinations of, but are not limited to, Beta-2 Microglobulin, Brain-Derived Neurotrophic Factor, Cancer Antigen 19-9, Carcinoembryonic Antigen, C Reactive Protein, EGF, Fatty Acid Binding Protein, Factor VII, Growth Hormone, GM-CSF, IL-1alpha, IL-1beta, IL-1ra, IL-7, IL-8, Prostatic Acid Phosphatase, Prostate Specific Antigen, Stem Cell Factor, TNF-alpha and VEGF.

[0040] In other embodiments, markers that are increased in non-responders compared to responders, include, but are not limited to, for example, Beta-2 Microglobulin, Brain-Derived Neurotrophic Factor, Cancer Antigen 19-9, Carcinoembryonic Antigen, C Reactive Protein, EGF, Fatty Acid Binding Protein, Factor VII, Growth Hormone, GM-CSF, IL-1 alpha, IL-1 beta, IL-1 ra, IL-7, IL-8, Prostatic Acid Phosphatase, Prostate Specific Antigen, Stem Cell Factor, TNF-alpha, and VEGF.

[0041] Methods for assessing whether a particular subject likely will respond favorably or poorly to a particular viral therapy are provided. These methods include:

[0042] contacting a sample, particularly a sample, such as a biopsy or body fluid or tissue that contains tumor cells, from the subject with a therapeutic virus;

[0043] determining whether the level of expression of at least one marker is altered in response to the virus, wherein the marker is a marker that is altered in a responder compared to a non-responder; and

[0044] based on whether the level of expression of the marker is altered, predicting whether a subject is likely to respond favorably or poorly to viral therapy.

[0045] Determining can be effected by any suitable method, such as for example, comparing the level of expression of the marker in the sample which has been contacted with the virus to the level of expression of the marker in a sample which has not been contacted with the virus. The sample can be contacted with the virus and cultured in vitro.

[0046] As with the methods discussed above, a levels of expression of a marker or plurality of markers can be assessed and/or a patter of expression of markers can be assessed. The markers are products whose level of expression is indicative of a favorable or a poor response to viral therapy. For some markers, an increased level in the presence of the virus is indicative of a favorable response; for others, a decreased level is indicative of a favorable response. As with the methods above, markers and combinations thereof can be determined empirically, such as by the methods exemplified in the Examples.

[0047] Markers include, but are not limited to, IL-18, MCP-5, IL-11, MCP-1, MPO, Apo A1, TIMP-1 (Tissue Inhibitor of Metalloproteinase Type-1), CRP (C Reactive Protein), Fibrinogen, MMP-9 (Matrix Metalloproteinase-9), Eotaxin (CCL11), GCP-2 (Granulocyte Chemotactic Protein-2; CXCL6), IL-6 (Interleukin-6), Tissue Factor (TF), SAP (Serum Amyloid P), FGF-basic (Fibroblast Growth Factor-basic), MCP-3 (Monocyte Chemoattractant Protein-3; CCL7), IP-10 (CXCL 10), MIP-2, Thrombopoetin, Cancer antigen 125, CD40, CD40 ligand, ENA-78, Ferritin, IL-12p40, IL-12p70, IL-16, MMP-2, PAI-1, TNF RII, TNF-beta and VCAM-1, MIP-1beta (Macrophage Inflammatory Protein-1beta), MDC (Macrophage-Derived Chemokine; CCL22), MIP-1alpha (Macrophage Inflammatory Protein-1alpha; CCL3), KC/GROalpha (Melanoma Growth Stimulatory Activity Protein), VEGF (Vascular Endothelial Cell Growth Factor), Endothelin-1, MIP-3 beta (Macrophage Inflammatory Protein-3 beta; Exodus-3 or ELC), Beta-2 microglobulin, IL-5 (Interleukin-5), IL-1 alpha (Interleukin-1 alpha), EGF (Epidermal Growth Factor), Lymphotactin (XCL1), GM-CSF (Granulocyte Macrophage-Colony Stimulating Factor), MIP-1gamma (Macrophage Inflammatory Protein-1 gamma; CCL4), IL-1beta (Interleukin-1 beta), Brain-derived neutrophic factor, Cancer antigen 19-9, Carcinoembryonic antigen, C reactive protein, EGF, Fatty acid binding protein, Factor VII, Growth hormone, IL-1 alpha, IL-1 beta, IL-1 ra, IL-7, IL-8, MDC, Prostatic acid phosphatase, Prostate specific antigen, Stem cell factor, Tissue factor, TNF-alpha, VEGF, Von Willebrand factor, IgA (Immunoglobulin A), Haptoglobin, MIP-2 (Macrophage Inflammatory Protein-2), IL-17 (Interleukin-17), SGOT (Serum Glutamic-Oxaloacetic Transaminase), IP-10 (Inducible Protein-10), IL-10, FGF-9 (Fibroblast Growth Factor-9), M-CSF (Macrophage-Colony Stimulating Factor), IL-4 (Interleukin-4), IL-3 (Interleukin-3), TPO (Thrombopoietin), SCF (Stem Cell Factor), LIF (Leukemia Inhibitory Factor), IL-2 (Interleukin-2), VCAM-1 (Vascular Cell Adhesion Molecule-1; CD106) and TNF alpha and OSM (Oncostatin M).

[0048] As noted, one or a plurality of markers can be assessed. The markers can be determined by contacting with a suitable array or microarray of probes for such markers. In these methods as in the others described above, a plurality of markers can be assessed, such as at least 5, 10, 15, 20, 25, 30, 35, 50, 75, 100, 150, 200, 250, 300, 330, 350. Such markers included, but are not limited to: IL-18 (Interleukin-18), MCP-5 (Monocyte Chemoattractant Protein-5; CCL12), IL-11 (Interleukin-11), MCP-1 (Monocyte Chemoattractant Protein-1), MPO (Myeloperoxidase), Apo A1 (Apolipoprotein A1), TIMP-1 (Tissue Inhibitor of Metalloproteinase Type-1), CRP (C Reactive Protein), Fibrinogen, MMP-9 (Matrix Metalloproteinase-9), Eotaxin (CCL11), GCP-2 (Granulocyte Chemotactic Protein-2; CXCL6), IL-6 (Interleukin-6), Tissue Factor (TF), SAP (Serum Amyloid P), FGF-basic (Fibroblast Growth Factor-basic), MCP-3 (Monocyte Chemoattractant Protein-3; CCL7), IP-10 (CXCL 10), MIP-2, Thrombopoetin, Cancer antigen 125, CD40, CD40 ligand, ENA-78, Ferritin, IL-12p40, IL-12p70, IL-16, MMP-2, PAI-1, TNF RII, TNF-beta and VCAM-1, MIP-1beta (Macrophage Inflammatory Protein-1beta), MDC (Macrophage-Derived Chemokine; CCL22), MIP-1alpha (Macrophage Inflammatory Protein-1alpha; CCL3), KC/GROalpha (Melanoma Growth Stimulatory Activity Protein), VEGF (Vascular Endothelial Cell Growth Factor), Endothelin-1, MIP-3 beta (Macrophage Inflammatory Protein-3 beta; Exodus-3 or ELC), Beta-2 microglobulin, IL-5 (Interleukin-5), IL-1 alpha (Interleukin-1 alpha), EGF (Epidermal Growth Factor), Lymphotactin (XCL1), GM-CSF (Granulocyte Macrophage-Colony Stimulating Factor), MIP-1 gamma (Macrophage Inflammatory Protein-1gamma; CCL4), IL-1beta (Interleukin-1 beta), Brain-derived neutrophic factor, Cancer antigen 19-9, Carcinoembryonic antigen, C reactive protein, EGF, Fatty acid binding protein, Factor VII, Growth hormone, IL-1 alpha, IL-1 beta, IL-1 ra, IL-7, IL-8, MDC, Prostatic acid phosphatase, Prostate specific antigen, Stem cell factor, Tissue factor, TNF-alpha, VEGF, Von Willebrand factor, IgA (Immunoglobulin A), Haptoglobin, MIP-2 (Macrophage Inflammatory Protein-2), IL-17 (Interleukin-17), SGOT (Serum Glutamic-Oxaloacetic Transaminase), IP-10 (Inducible Protein-10), IL-10, FGF-9 (Fibroblast Growth Factor-9), M-CSF (Macrophage-Colony Stimulating Factor), IL-4 (Interleukin-4), IL-3 (Interleukin-3), TPO (Thrombopoietin), SCF (Stem Cell Factor), LIF (Leukemia Inhibitory Factor), IL-2 (Interleukin-2), VCAM-1 (Vascular Cell Adhesion Molecule-1; CD106) and TNF alpha and OSM (Oncostatin M).

[0049] For example, the level of expression of one or more markers selected from among IL-18 (Interleukin-18), MCP-5 (Monocyte Chemoattractant Protein-5; CCL12), IL-11 (Interleukin-11), MCP-1 (Monocyte Chemoattractant Protein-1), MPO (Myeloperoxidase), Apo A1 (Apolipoprotein A1), TIMP-1 (Tissue Inhibitor of Metalloproteinase Type-1), CRP (C Reactive Protein), Fibrinogen, MMP-9 (Matrix Metalloproteinase-9), Eotaxin (CCL11), GCP-2 (Granulocyte Chemotactic Protein-2; CXCL6), IL-6 (Interleukin-6), Tissue Factor (TF), SAP (Serum Amyloid P), FGF-basic (Fibroblast Growth Factor-basic), MCP-3 (Monocyte Chemoattractant Protein-3; CCL7), IP-10 (CXCL 10), MIP-2, Thrombopoetin, Cancer antigen 125, CD40, CD40 ligand, ENA-78, Ferritin, IL-12p40, IL-12p70, IL-16, MMP-2, PAI-1, TNF RII, TNF-beta and VCAM-1 is assessed. One or all or plurality or a majority should be increased. Other markers in which expression of one or more or a majority or plurality in response to the virus decreased in response to the virus include, but are not limited to, MIP-1beta (Macrophage Inflammatory Protein-1beta), MDC (Macrophage-Derived Chemokine; CCL22), MIP-1alpha (Macrophage Inflammatory Protein-1alpha; CCL3), KC/GROalpha (Melanoma Growth Stimulatory Activity Protein), VEGF (Vascular Endothelial Cell Growth Factor), Endothelin-1, MIP-3 beta (Macrophage Inflammatory Protein-3 beta; Exodus-3 or ELC), Beta-2 microglobulin, IL-5 (Interleukin-5), IL-1 alpha (Interleukin-1 alpha), EGF (Epidermal Growth Factor), Lymphotactin (XCL1), GM-CSF (Granulocyte Macrophage-Colony Stimulating Factor), MIP-1gamma (Macrophage Inflammatory Protein-1 gamma; CCL4), IL-1beta (Interleukin-1 beta), Brain-derived neutrophic factor, Cancer antigen 19-9, Carcinoembryonic antigen, C reactive protein, EGF, Fatty acid binding protein, Factor VII, Growth hormone, IL-1 alpha, IL-1 beta, IL-1 ra, IL-7, IL-8, MDC, Prostatic acid phosphatase, Prostate specific antigen, free, Stem cell factor, Tissue factor, TNF-alpha, VEGF and Von Willebrand factor.

[0050] Also provided are methods for assessing whether a candidate virus will be effective in viral therapy by determining whether the candidate virus alters the level of expression of at least one marker in a cell contacted with the candidate virus, wherein the cell is known to be responsive to viral therapy vectors; and based on whether the level of expression of the marker is altered, predicting whether candidate virus will be effective for viral therapy.

[0051] Determining can be effected by comparing the level of expression of the marker in the cell contacted with the candidate virus to the level of expression of the marker in a cell not contacted with the candidate virus. The cell can be contacted with the virus and cultured in vitro. Contacting can be effected v Contacting can be effected in vivo.

[0052] As with the above, the markers or combinations can be selected. Markers include, but are not limited to IL-18 (Interleukin-18), MCP-5 (Monocyte Chemoattractant Protein-5; CCL12), IL-11 (Interleukin-11), MCP-1 (Monocyte Chemoattractant Protein-1), MPO (Myeloperoxidase), Apo A1 (Apolipoprotein A1), TIMP-1 (Tissue Inhibitor of Metalloproteinase Type-1), CRP (C Reactive Protein), Fibrinogen, MMP-9 (Matrix Metalloproteinase-9), Eotaxin (CCL11), GCP-2 (Granulocyte Chemotactic Protein-2; CXCL6), IL-6 (Interleukin-6), Tissue Factor (TF), SAP (Serum Amyloid P), FGF-basic (Fibroblast Growth Factor-basic), MCP-3 (Monocyte Chemoattractant Protein-3; CCL7), IP-10 (CXCL 10), MIP-2, Thrombopoetin, Cancer antigen 125, CD40, CD40 ligand, ENA-78, Ferritin, IL-12p40, IL-12p70, IL-16, MMP-2, PAI-1, TNF RII, TNF-beta and VCAM-1, MIP-1beta (Macrophage Inflammatory Protein-1beta), MDC (Macrophage-Derived Chemokine; CCL22), MIP-1alpha (Macrophage Inflammatory Protein-1alpha; CCL3), KC/GROalpha (Melanoma Growth Stimulatory Activity Protein), VEGF (Vascular Endothelial Cell Growth Factor), Endothelin-1, MIP-3 beta (Macrophage Inflammatory Protein-3 beta; Exodus-3 or ELC), Beta-2 microglobulin, IL-5 (Interleukin-5), IL-1 alpha (Interleukin-1 alpha), EGF (Epidermal Growth Factor), Lymphotactin (XCL1), GM-CSF (Granulocyte Macrophage-Colony Stimulating Factor), MIP-1gamma (Macrophage Inflammatory Protein-1gamma; CCL4), IL-1beta (Interleukin-1 beta), Brain-derived neutrophic factor, Cancer antigen 19-9, Carcinoembryonic antigen, C reactive protein, EGF, Fatty acid binding protein, Factor VII, Growth hormone, IL-1 alpha, IL-1 beta, IL-1 ra, IL-7, IL-8, MDC, Prostatic acid phosphatase, Prostate specific antigen, Stem cell factor, Tissue factor, TNF-alpha, VEGF, Von Willebrand factor, IgA (Immunoglobulin A), Haptoglobin, MIP-2 (Macrophage Inflammatory Protein-2), IL-17 (Interleukin-17), SGOT (Serum Glutamic-Oxaloacetic Transaminase), IP-10 (Inducible Protein-10), IL-10, FGF-9 (Fibroblast Growth Factor-9), M-CSF (Macrophage-Colony Stimulating Factor), IL-4 (Interleukin-4), IL-3 (Interleukin-3), TPO (Thrombopoietin), SCF (Stem Cell Factor), LIF (Leukemia Inhibitory Factor), IL-2 (Interleukin-2), VCAM-1 (Vascular Cell Adhesion Molecule-1; CD106) and TNF alpha and OSM (Oncostatin M).

[0053] As with the methods discussed above, a plurality or combinations of markers (5, 10, 15, 20, 25, 30, 35, 50, 100, 150, 200, 250, 300, 330, 350 or more) can be assessed. They can be assessed one-by-one or using a gene chip, or array or microarray.

[0054] As with the methods above, the markers include those that are increases in responders, such as, but are not limited to IL-18 (Interleukin-18), MCP-5 (Monocyte Chemoattractant Protein-5; CCL12), IL-11 (Interleukin-11), MCP-1 (Monocyte Chemoattractant Protein-1), MPO (Myeloperoxidase), Apo A1 (Apolipoprotein A1), TIMP-1 (Tissue Inhibitor of Metalloproteinase Type-1), CRP (C Reactive Protein), Fibrinogen, MMP-9 (Matrix Metalloproteinase-9), Eotaxin (CCL11), GCP-2 (Granulocyte Chemotactic Protein-2; CXCL6), IL-6 (Interleukin-6), Tissue Factor (TF), SAP (Serum Amyloid P), FGF-basic (Fibroblast Growth Factor-basic), MCP-3 (Monocyte Chemoattractant Protein-3; CCL7), IP-10 (CXCL 10), MIP-2, Thrombopoetin, Cancer antigen 125, CD40, CD40 ligand, ENA-78, Ferritin, IL-12p40, IL-12p70, IL-16, MMP-2, PAI-1, TNF RII, TNF-beta and VCAM-1, and/or markers whose expression is decreased in response to the virus, such as, but are not limited to, MIP-1beta (Macrophage Inflammatory Protein-1beta), MDC (Macrophage-Derived Chemokine; CCL22), MIP-1alpha (Macrophage Inflammatory Protein-1alpha; CCL3), KC/GROalpha (Melanoma Growth Stimulatory Activity Protein), VEGF (Vascular Endothelial Cell Growth Factor), Endothelin-1, MIP-3 beta (Macrophage Inflammatory Protein-3 beta; Exodus-3 or ELC), Beta-2 microglobulin, IL-5 (Interleukin-5), IL-1 alpha (Interleukin-1 alpha), EGF (Epidermal Growth Factor), Lymphotactin (XCL1), GM-CSF (Granulocyte Macrophage-Colony Stimulating Factor), MIP-1gamma (Macrophage Inflammatory Protein-1 gamma; CCL4), IL-1beta (Interleukin-1 beta), Brain-derived neutrophic factor, Cancer antigen 19-9, Carcinoembryonic antigen, C reactive protein, EGF, Fatty acid binding protein, Factor VII, Growth hormone, IL-1 alpha, IL-1 beta, IL-1 ra, IL-7, IL-8, MDC, Prostatic acid phosphatase, Prostate specific antigen, free, Stem cell factor, Tissue factor, TNF-alpha, VEGF and Von Willebrand factor.

[0055] Also provided are methods for monitoring the progress of viral therapy in a subject by determining whether the level of expression of at least one marker is altered in the subject at a plurality of time points; and based on whether the level of expression of the marker is altered, making an assessment of whether the viral therapy is effective.

[0056] Determining can be effected by comparing the level of expression of the marker in a first sample to the level of expression of the marker in at least a second sample obtained from the subject subsequent to the time at which the first sample was obtained. Data can be taken at any suitable time points, including for example starting prior to or at about the same time as beginning the viral therapy, and can include time point(s) during the viral therapy. As above, one or a plurality or combinations of markers can be monitored, and typically include at least one marker known to be altered in response to effective viral therapy in a host. Markers include, for example, but are not limited to IL-18 (Interleukin-18), MCP-5 (Monocyte Chemoattractant Protein-5; CCL12), IL-1 (Interleukin-11), MCP-1 (Monocyte Chemoattractant Protein-1), MPO (Myeloperoxidase), Apo A1 (Apolipoprotein A1), TIMP-1 (Tissue Inhibitor of Metalloproteinase Type-1), CRP (C Reactive Protein), Fibrinogen, MMP-9 (Matrix Metalloproteinase-9), Eotaxin (CCL11), GCP-2 (Granulocyte Chemotactic Protein-2; CXCL6), IL-6 (Interleukin-6), Tissue Factor (TF), SAP (Serum Amyloid P), FGF-basic (Fibroblast Growth Factor-basic), MCP-3 (Monocyte Chemoattractant Protein-3; CCL7), IP-10 (CXCL 10), MIP-2, Thrombopoetin, Cancer antigen 125, CD40, CD40 ligand, ENA-78, Ferritin, IL-12p40, IL-12p70, IL-16, MMP-2, PAI-1, TNF RII, TNF-beta and VCAM-1, MIP-1beta (Macrophage Inflammatory Protein-1beta), MDC (Macrophage-Derived Chemokine; CCL22), MIP-1alpha (Macrophage Inflammatory Protein-1alpha; CCL3), KC/GROalpha (Melanoma Growth Stimulatory Activity Protein), VEGF (Vascular Endothelial Cell Growth Factor), Endothelin-1, MIP-3 beta (Macrophage Inflammatory Protein-3 beta; Exodus-3 or ELC), Beta-2 microglobulin, IL-5 (Interleukin-5), IL-1 alpha (Interleukin-1 alpha), EGF (Epidermal Growth Factor), Lymphotactin (XCL1), GM-CSF (Granulocyte Macrophage-Colony Stimulating Factor), MIP-1 gamma (Macrophage Inflammatory Protein-1 gamma; CCL4), IL-1beta (Interleukin-1 beta), Brain-derived neutrophic factor, Cancer antigen 19-9, Carcinoembryonic antigen, C reactive protein, EGF, Fatty acid binding protein, Factor VII, Growth hormone, IL-1 alpha, IL-1 beta, IL-1 ra, IL-7, IL-8, MDC, Prostatic acid phosphatase, Prostate specific antigen, Stem cell factor, Tissue factor, TNF-alpha, VEGF, Von Willebrand factor, IgA (Immunoglobulin A), Haptoglobin, MIP-2 (Macrophage Inflammatory Protein-2), IL-17 (Interleukin-17), SGOT (Serum Glutamic-Oxaloacetic Transaminase), IP-10 (Inducible Protein-10), IL-10, FGF-9 (Fibroblast Growth Factor-9), M-CSF (Macrophage-Colony Stimulating Factor), IL-4 (Interleukin-4), IL-3 (Interleukin-3), TPO (Thrombopoietin), SCF (Stem Cell Factor), LIF (Leukemia Inhibitory Factor), IL-2 (Interleukin-2), VCAM-1 (Vascular Cell Adhesion Molecule-1; CD106) and TNF alpha and OSM (Oncostatin M).

[0057] For example, at least expression of at least 5 or more, at least 10 or more, or at least 15 or more markers is monitored. Such markers, include, but are not limited to, IL-18 (Interleukin-18), MCP-5 (Monocyte Chemoattractant Protein-5; CCL12), IL-11 (Interleukin-11), MCP-1 (Monocyte Chemoattractant Protein-1), MPO (Myeloperoxidase), Apo A1 (Apolipoprotein A1), TIMP-1 (Tissue Inhibitor of Metalloproteinase Type-1), CRP (C Reactive Protein), Fibrinogen, MMP-9 (Matrix Metalloproteinase-9), Eotaxin (CCL11), GCP-2 (Granulocyte Chemotactic Protein-2; CXCL6), IL-6 (Interleukin-6), Tissue Factor (TF), SAP (Serum Amyloid P), FGF-basic (Fibroblast Growth Factor-basic), MCP-3 (Monocyte Chemoattractant Protein-3; CCL7), IP-10 (CXCL 10), MIP-2, Thrombopoetin, Cancer antigen 125, CD40, CD40 ligand, ENA-78, Ferritin, IL-12p40, IL-12p70, IL-16, MMP-2, PAI-1, TNF RII, TNF-beta and VCAM-1, MIP-1beta (Macrophage Inflammatory Protein-1beta), MDC (Macrophage-Derived Chemokine; CCL22), MIP-1alpha (Macrophage Inflammatory Protein-1alpha; CCL3), KC/GROalpha (Melanoma Growth Stimulatory Activity Protein), VEGF (Vascular Endothelial Cell Growth Factor), Endothelin-1, MIP-3 beta (Macrophage Inflammatory Protein-3 beta; Exodus-3 or ELC), Beta-2 microglobulin, IL-5 (Interleukin-5), IL-1 alpha (Interleukin-1 alpha), EGF (Epidermal Growth Factor), Lymphotactin (XCL1), GM-CSF (Granulocyte Macrophage-Colony Stimulating Factor), MIP-1gamma (Macrophage Inflammatory Protein-1gamma; CCL4), IL-1beta (Interleukin-1 beta), Brain-derived neutrophic factor, Cancer antigen 19-9, Carcinoembryonic antigen, C reactive protein, EGF, Fatty acid binding protein, Factor VII, Growth hormone, IL-1 alpha, IL-1 beta, IL-1 ra, IL-7, IL-8, MDC, Prostatic acid phosphatase, Prostate specific antigen, Stem cell factor, Tissue factor, TNF-alpha, VEGF, Von Willebrand factor, IgA (Immunoglobulin A), Haptoglobin, MIP-2 (Macrophage Inflammatory Protein-2), IL-17 (Interleukin-17), SGOT (Serum Glutamic-Oxaloacetic Transaminase), IP-10 (Inducible Protein-10), IL-10, FGF-9 (Fibroblast Growth Factor-9), M-CSF (Macrophage-Colony Stimulating Factor), IL-4 (Interleukin-4), IL-3 (Interleukin-3), TPO (Thrombopoietin), SCF (Stem Cell Factor), LIF (Leukemia Inhibitory Factor), IL-2 (Interleukin-2), VCAM-1 (Vascular Cell Adhesion Molecule-1; CD106) and TNF alpha and OSM (Oncostatin M).

[0058] Markers whose expression is increased include, for example, one or more of IL-18 (Interleukin-18), MCP-5 (Monocyte Chemoattractant Protein-5; CCL12), IL-11 (Interleukin-11), MCP-1 (Monocyte Chemoattractant Protein-1), MPO (Myeloperoxidase), Apo A1 (Apolipoprotein A1), TIMP-1 (Tissue Inhibitor of Metalloproteinase Type-1), CRP (C Reactive Protein), Fibrinogen, MMP-9 (Matrix Metalloproteinase-9), Eotaxin (CCL11), GCP-2 (Granulocyte Chemotactic Protein-2; CXCL6), IL-6 (Interleukin-6), Tissue Factor (TF), SAP (Serum Amyloid P), FGF-basic (Fibroblast Growth Factor-basic), MCP-3 (Monocyte Chemoattractant Protein-3; CCL7), IP-10 (CXCL 10), MIP-2, Thrombopoetin, Cancer antigen 125, CD40, CD40 ligand, ENA-78, Ferritin, IL-12p40, IL-12p70, IL-16, MMP-2, PAI-1, TNF RII, TNF-beta and VCAM-1; and markers whose expression is decreased, include, for example, one or more of MIP-1beta (Macrophage Inflammatory Protein-1beta), MDC (Macrophage-Derived Chemokine; CCL22), MIP-1alpha (Macrophage Inflammatory Protein-1alpha; CCL3), KC/GROalpha (Melanoma Growth Stimulatory Activity Protein), VEGF (Vascular Endothelial Cell Growth Factor), Endothelin-1, MIP-3 beta (Macrophage Inflammatory Protein-3 beta; Exodus-3 or ELC), Beta-2 microglobulin, IL-5 (Interleukin-5), IL-1 alpha (Interleukin-1 alpha), EGF (Epidermal Growth Factor), Lymphotactin (XCL1), GM-CSF (Granulocyte Macrophage-Colony Stimulating Factor), MIP-1gamma (Macrophage Inflammatory Protein-1gamma; CCL4), IL-1beta (Interleukin-1 beta), Brain-derived neutrophic factor, Cancer antigen 19-9, Carcinoembryonic antigen, C reactive protein, EGF, Fatty acid binding protein, Factor VII, Growth hormone, IL-1 alpha, IL-1 beta, IL-1 ra, IL-7, IL-8, MDC, Prostatic acid phosphatase, Prostate specific antigen, free, Stem cell factor, Tissue factor, TNF-alpha, VEGF and Von Willebrand factor.

[0059] Also provided are combinations of a therapeutic virus, including those provided herein; and a reagent(s) to assess expression of at least one marker, such as, but are not limited to, IL-18 (Interleukin-18), MCP-5 (Monocyte Chemoattractant Protein-5; CCL12), IL-11 (Interleukin-11), MCP-1 (Monocyte Chemoattractant Protein-1), MPO (Myeloperoxidase), Apo A1 (Apolipoprotein A1), TIMP-1 (Tissue Inhibitor of Metalloproteinase Type-1), CRP (C Reactive Protein), Fibrinogen, MMP-9 (Matrix Metalloproteinase-9), Eotaxin (CCL11), GCP-2 (Granulocyte Chemotactic Protein-2; CXCL6), IL-6 (Interleukin-6), Tissue Factor (TF), SAP (Serum Amyloid P), FGF-basic (Fibroblast Growth Factor-basic), MCP-3 (Monocyte Chemoattractant Protein-3; CCL7), IP-10 (CXCL 10), MIP-2, Thrombopoetin, Cancer antigen 125, CD40, CD40 ligand, ENA-78, Ferritin, IL-12p40, IL-12p70, IL-16, MMP-2, PAI-1, TNF RII, TNF-beta and VCAM-1, MIP-1beta (Macrophage Inflammatory Protein-1beta), MDC (Macrophage-Derived Chemokine; CCL22), MIP-1alpha (Macrophage Inflammatory Protein-1alpha; CCL3), KC/GROalpha (Melanoma Growth Stimulatory Activity Protein), VEGF (Vascular Endothelial Cell Growth Factor), Endothelin-1, MIP-3 beta (Macrophage Inflammatory Protein-3 beta; Exodus-3 or ELC), Beta-2 microglobulin, IL-5 (Interleukin-5), IL-1 alpha (Interleukin-1 alpha), EGF (Epidermal Growth Factor), Lymphotactin (XCL1), GM-CSF (Granulocyte Macrophage-Colony Stimulating Factor), MIP-1gamma (Macrophage Inflammatory Protein-1gamma; CCL4), IL-1beta (Interleukin-1 beta), Brain-derived neutrophic factor, Cancer antigen 19-9, Carcinoembryonic antigen, C reactive protein, EGF, Fatty acid binding protein, Factor VII, Growth hormone, IL-1 alpha, IL-1 beta, IL-1 ra, IL-7, IL-8, MDC, Prostatic acid phosphatase, Prostate specific antigen, Stem cell factor, Tissue factor, TNF-alpha, VEGF, Von Willebrand factor, IgA (Immunoglobulin A), Haptoglobin, MIP-2 (Macrophage Inflammatory Protein-2), IL-17 (Interleukin-17), SGOT (Serum Glutamic-Oxaloacetic Transaminase), IP-10 (Inducible Protein-10), IL-10, FGF-9 (Fibroblast Growth Factor-9), M-CSF (Macrophage-Colony Stimulating Factor), IL-4 (Interleukin-4), IL-3 (Interleukin-3), TPO (Thrombopoietin), SCF (Stem Cell Factor), LIF (Leukemia Inhibitory Factor), IL-2 (Interleukin-2), VCAM-1 (Vascular Cell Adhesion Molecule-1; CD106) and TNF alpha and OSM (Oncostatin M). Reagents include any suitable reagent, such as a nucleic acid probe, that is hybridized under suitable conditions, typically medium or high stringency to nucleic acid from a sample. The combinations are associations of the elements, such as use together or in a box or in proximity and/or packaged, such as a kit. The combinations can be packaged as kits, optionally including additional reagents and materials and/or instructions for practicing a method.

### DETAILED DESCRIPTION

[0060] A. Definitions

[0061] B. Methods for Assessing Viral Therapy
[0062] 1. Methods of Assessing Whether a Subject is Likely to Respond Favorably or Poorly to Viral Therapy by Assessing a Replication Indicator
   [0063] a. Virus titer
   [0064] b. Expression of virus genes
   [0065] c. Decreased expression of housekeeping genes
   [0066] d. Expression of tumor proteins

[0067] C. Therapeutic Viruses
[0068] 1. Modifications of Therapeutic Viruses
[0069] 2. Viruses Encoding a Marker Protein that is Increased in Cells that Respond Favorable to Tumor Therapy
   [0070] a. IP-10 encoding viruses
   [0071] b. MCP-1 encoding viruses
   [0072] c. TIMP-1, 2, 3 encoding viruses
[0073] 3. Viruses an Agent which Reduces the Level of Expression of a Marker Protein

[0074] D. Host Cells
[0075] 1. Harvesting tumor cells from patient

[0076] E. Pharmaceutical Compositions

[0077] F. Methods of administering viral therapy
[0078] 1. Monitoring the progress of viral therapy

[0079] G. Identifying markers associated with a response to viral therapy

[0080] H. Identifying a virus for viral therapy

[0081] I. Articles of Manufacture and Kits

[0082] J. Examples

### A. DEFINITIONS

[0083] Unless defined otherwise, all technical and scientific terms used herein have the same meaning as is commonly understood by one of skill in the art to which the invention(s) belong. All patents, patent applications, published applications and publications, GENBANK sequences, websites and other published materials referred to throughout the entire disclosure herein, unless noted otherwise, are incorporated by reference in their entirety. In the event that there is a plurality of definitions for terms herein, those in this section prevail. Where reference is made to a URL or other such identifier or address, it is understood that such identifiers can change and particular information on the internet can come and go, but equivalent information is known and can be readily accessed, such as by searching the internet and/or appropriate databases. Reference thereto evidences the availability and public dissemination of such information. To the extent, if any, that publications and patents or patent applications incorporated by reference contradict the disclosure contained in the specification, the specification is intended to supersede and/or take precedence over any such contradictory material.

[0084] As used herein, “virus” refers to any of a large group of entities referred to as viruses. Viruses typically contain a protein coat surrounding an RNA or DNA core of genetic material, and are capable of growth and multiplication only in living cells. Viruses for use in the methods provided herein include, but are not limited, to a poxvirus, including a vaccinia virus. Other exemplary viruses include, but are not limited to, adenovirus, adeno-associated virus, herpes simplex virus, Newcastle disease virus, vesicular stomatitis virus, mumps virus, influenza virus, measles virus, reovirus, human immunodeficiency virus (HIV), hanta virus, myxoma virus, cytomegalovirus (CMV), lentivirus, Sindbis virus, and any plant or insect virus.

[0085] As used herein, the term “viral vector” is used according to its art-recognized meaning. It refers to a nucleic acid vector construct that includes at least one element of viral origin and can be packaged into a viral vector particle. The viral vector particles can be used for the purpose of transferring DNA, RNA or other nucleic acids into cells either in vitro or in vivo. Viral vectors include, but are not limited to, retroviral vectors, vaccinia vectors, lentiviral vectors, herpes virus vectors (e.g., HSV), baculoviral vectors, cytomegalovirus (CMV) vectors, papillomavirus vectors, simian virus (SV40) vectors, semliki forest virus vectors, phage vectors, adenoviral vectors, and adeno-associated viral (AAV) vectors.

[0086] As used herein, the term “modified” with reference to a gene refers to a deleted gene, a gene encoding a gene product having one or more truncations, mutations, insertions or deletions, or a gene that is inserted (into the chromosome or on a plasmid, phagemid, cosmid, and phage) encoding a gene product, typically accompanied by at least a change in function of the modified gene product or virus.

[0087] As used herein, the term “modified virus” refers to a virus that is altered with respect to a parental strain of the virus. Typically modified viruses have one or more truncations, mutations, insertions or deletions in the genome of virus. A modified virus can have one or more endogenous viral genes modified and/or one or more intergenic regions modified. Exemplary modified viruses can have one or more heterologous nucleic acid sequences inserted into the genome of the virus. Modified viruses can contain one more heterologous nucleic acid sequences in the form of a gene expression cassette for the expression of a heterologous gene. As used herein, modification of a heterologous nucleic acid molecule with respect to a virus containing a heterologous nucleic acid molecule refers to any alteration of the heterologous nucleic acid molecule including truncations, mutations, insertions, or deletions of the nucleic acid molecule. Modification of a heterologous nucleic acid molecule can also include alteration of the viral genome, which can be, for example, a deletion of all or a portion heterologous nucleic from the viral genome or insertion of an additional heterologous nucleic acid molecule into the viral genome.

[0088] As used herein, the term “therapeutic virus” refers to a virus that is administered for the treatment of a disease or disorder. A therapeutic virus is typically a modified virus. Such modifications include one or more insertions, deletions, or mutations in the genome of the virus. Therapeutic viruses typically possess modifications in one or more endogenous viral genes or one or more intergenic regions, which attenuate the toxicity of the virus, and can optionally express a heterologous therapeutic gene product and/or detectable protein. Therapeutic viruses can contain heterologous nucleic acid molecules, including one or more gene expression cassettes for the expression of the therapeutic gene product and/or detectable protein. Therapeutic viruses can be replication competent viruses (e.g., oncolytic viruses) including conditional replicating viruses, or replication-defective viruses. As used herein, the term, “therapeutic gene product” refers to any heterologous protein expressed by the therapeutic virus that ameliorates the symptoms of a disease or disorder or ameliorates the disease or disorder.

[0089] As used herein, a responder is a tumor cell for which a therapeutic virus is effective against in vivo. The methods provided herein provide in vitro assays for predicted whether a particular tumor is a responder or a non-responder. If a tumor is a predicted responder for a therapeutic virus, the tumor is likely to respond favorably to tumor treatment. As used herein, a tumor that respond favorably to a treatment with a therapeutic virus means that treatment of a tumor with the virus will cause the tumor to slow or stop tumor growth, or cause the tumor to shrink or regress.

[0090] As used herein, a nonresponder is a tumor for which a therapeutic virus is not effective against in vivo.

[0091] As used herein, a marker is any gene product for which level of gene expression is assayed. A marker can be a gene product that is increased, decreased, or unchanged in a tumor or that is increased, decreased, or unchanged in a tumor that is treated with a virus. A marker can also be a gene product that is increased, decreased or unchanged in a subject that bears a tumor or that is increased, decreased, or unchanged in a subject that bears a tumor and that is treated with a virus. The characteristic levels of expression of one or more marker proteins in a tumor or in a host that bears a tumor can be used to generate a marker profile, or expression profile for the particular tumor. Marker profiles can be generated for untreated tumors and tumors that have been treated with a virus.

[0092] As use herein, delayed replication refers to the inability of a therapeutic virus to efficiently replicate in a tumor in the in vitro replication assay methods provided herein. Viruses that exhibit delayed replication in a tumor following infection of the tumor are predicted to not be effective for therapy of

[0093] As used herein, a replication indicator is any parameter indicative of viral replication. For example, such indicators include, but are not limited to, virus titer, expression of viral proteins, expression of reporter proteins, expression of host housekeeping genes or other host proteins.

[0094] As used herein, a housekeeping gene is a gene involved in basic functions needed for the sustenance of the cell. Housekeeping genes are constitutively expressed. Exemplary housekeeping genes can be found in the Examples and elsewhere herein.

[0095] As used herein, attenuation of a virus means to a reduction or elimination of deleterious or toxic effects to a host upon administration of the virus compared to an un-attenuated virus. As used herein, a virus with low toxicity means that upon administration a virus does not accumulate in organs and tissues in the host to an extent that results in damage or harm to organs, or that impacts survival of the host to a greater extent than the disease being treated does. For the purposes herein, attenuation of toxicity is used interchangeably with attenuation of virulence and attenuation of pathogenicity.

[0096] As used herein, the term “viral load” is the amount of virus present in the blood of a patient. Viral load also is referred to as viral titer or viremia. Viral load can be measured in variety of standard ways, including immunochemistry methods or by plaque assay.

[0097] As used herein, the term “toxicity” with reference to a virus refers to the ability of the virus to cause harm to the subject to which the virus has been administered.

[0098] As used herein virulence and pathogenicity with reference to a virus refers to the ability of the virus to cause disease or harm in the subject to which the virus has been administered. Hence, for the purposes herein the terms toxicity, virulence, and pathogenicity with reference to a virus are used interchangeably.

[0099] As used herein, a delivery vehicle for administration refers to a lipid-based or other polymer-based composition, such as liposome, micelle, or reverse micelle, which associates with an agent, such as a virus provided herein, for delivery into a host animal.

[0100] As used herein, a disease or disorder refers to a pathological condition in an organism resulting from, for example, infection or genetic defect, and characterized by identifiable symptoms.

[0101] As used herein, treatment means any manner in which the symptoms of a condition, disorder or disease are ameliorated or otherwise beneficially altered. Treatment also encompasses any pharmaceutical use of the viruses described and provided herein.

[0102] As used herein, amelioration or alleviation of symptoms associated with a disease refers to any lessening, whether permanent or temporary, lasting or transient of symptoms that can be attributed to or associated with a disease. Similarly, amelioration or alleviation of symptoms associated with administration of a virus refers to any lessening, whether permanent or temporary, lasting or transient of symptoms that can be attributed to or associated with an administration of the virus for treatment of a disease.

[0103] As used herein, an effective amount of a virus or compound for treating a particular disease is an amount that is sufficient to ameliorate, or in some manner reduce the symptoms associated with the disease. Such an amount can be administered as a single dosage or can be administered according to a regimen, whereby it is effective. The amount can cure the disease but, typically, is administered in order to ameliorate the symptoms of the disease. Repeated administration can be required to achieve the desired amelioration of symptoms.

[0104] As used herein, an effective amount of a therapeutic agent for control of viral unit numbers or viral titer in a patient is an amount that is sufficient to prevent a virus introduced to a patient for treatment of a disease from overwhelming the patient's immune system such that the patient suffers adverse side effects due to virus toxicity or pathogenicity. Such side effects can include, but are not limited to fever, abdominal pain, aches or pains in muscles, cough, diarrhea, or general feeling of discomfort or illness that are associated with virus toxicity and are related to the subject's immune and inflammatory responses to the virus. Side effects or symptoms can also include escalation of symptoms due to a systemic inflammatory response to the virus, such as, but not limited to, jaundice, blood-clotting disorders and multiple-organ system failure. Such an amount can be administered as a single dosage or can be administered according to a regimen, whereby it is effective. The amount can prevent the appearance of side effects but, typically, is administered in order to ameliorate the symptoms of the side effects associated with the virus and virus toxicity. Repeated administration can be required to achieve the desired amelioration of symptoms.

[0105] As used herein, an in vivo method refers to a method performed within the living body of a subject.

[0106] As used herein, a subject includes any animal for whom diagnosis, screening, monitoring or treatment is contemplated. Animals include mammals such as primates and domesticated animals. An exemplary primate is human. A patient refers to a subject such as a mammal, primate, human, or livestock subject afflicted with a disease condition or for which a disease condition is to be determined or risk of a disease condition is to be determined.

[0107] As used herein, the term “neoplasm” or “neoplasia” refers to abnormal new cell growth, and thus means the same as tumor, which can be benign or malignant. Unlike hyperplasia, neoplastic proliferation persists even in the absence of the original stimulus.

[0108] As used herein, neoplastic disease refers to any disorder involving cancer, including tumor development, growth, metastasis and progression.

[0109] As used herein, cancer is a term for diseases caused by or characterized by any type of malignant tumor, including metastatic cancers, lymphatic tumors, and blood cancers. Exemplary cancers include, but are not limited to: leukemia, lymphoma, pancreatic cancer, lung cancer, ovarian cancer, breast cancer, cervical cancer, bladder cancer, prostate cancer, glioma tumors, adenocarcinomas, liver cancer and skin cancer. Exemplary cancers in humans include a bladder tumor, breast tumor, prostate tumor, basal cell carcinoma, biliary tract cancer, bladder cancer, bone cancer, brain and CNS cancer (e.g., glioma tumor), cervical cancer, choriocarcinoma, colon and rectum cancer, connective tissue cancer, cancer of the digestive system; endometrial cancer, esophageal cancer; eye cancer; cancer of the head and neck; gastric cancer; intra-epithelial neoplasm; kidney cancer; larynx cancer; leukemia; liver cancer; lung cancer (e.g. small cell and non-small cell); lymphoma including Hodgkin's and Non-Hodgkin's lymphoma; melanoma; myeloma, neuroblastoma, oral cavity cancer (e.g., lip, tongue, mouth, and pharynx); ovarian cancer; pancreatic cancer, retinoblastoma; rhabdomyosarcoma; rectal cancer, renal cancer, cancer of the respiratory system; sarcoma, skin cancer; stomach cancer, testicular cancer, thyroid cancer; uterine cancer, cancer of the urinary system, as well as other carcinomas and sarcomas. Malignant disorders commonly diagnosed in dogs, cats, and other pets include, but are not limited to, lymphosarcoma, osteosarcoma, mammary tumors, mastocytoma, brain tumor, melanoma, adenosquamous carcinoma, carcinoid lung tumor, bronchial gland tumor, bronchiolar adenocarcinoma, fibroma, myxochondroma, pulmonary sarcoma, neurosarcoma, osteoma, papilloma, retinoblastoma, Ewing's sarcoma, Wilm's tumor, Burkitt's lymphoma, microglioma, neuroblastoma, osteoclastoma, oral neoplasia, fibrosarcoma, osteosarcoma and rhabdomyosarcoma, genital squamous cell carcinoma, transmissible venereal tumor, testicular tumor, seminoma, Sertoli cell tumor, hemangiopericytoma, histiocytoma, chloroma (e.g., granulocytic sarcoma), corneal papilloma, corneal squamous cell carcinoma, hemangiosarcoma, pleural mesothelioma, basal cell tumor, thymoma, stomach tumor, adrenal gland carcinoma, oral papillomatosis, hemangioendothelioma and cystadenoma, follicular lymphoma, intestinal lymphosarcoma, fibrosarcoma and pulmonary squamous cell carcinoma. In rodents, such as a ferret, exemplary cancers include insulinoma, lymphoma, sarcoma, neuroma, pancreatic islet cell tumor, gastric MALT lymphoma and gastric adenocarcinoma. Neoplasias affecting agricultural livestock include leukemia, hemangiopericytoma and bovine ocular neoplasia (in cattle); preputial fibrosarcoma, ulcerative squamous cell carcinoma, preputial carcinoma, connective tissue neoplasia and mastocytoma (in horses); hepatocellular carcinoma (in swine); lymphoma and pulmonary adenomatosis (in sheep); pulmonary sarcoma, lymphoma, Rous sarcoma, reticulo-endotheliosis, fibrosarcoma, nephroblastoma, B-cell lymphoma and lymphoid leukosis (in avian species); retinoblastoma, hepatic neoplasia, lymphosarcoma (lymphoblastic lymphoma), plasmacytoid leukemia and swimbladder sarcoma (in fish), caseous lumphadenitis (CLA): chronic, infectious, contagious disease of sheep and goats caused by the bacterium Corynebacterium pseudotuberculosis, and contagious lung tumor of sheep caused by jaagsiekte.

[0110] As used herein, the term “malignant,” as it applies to tumors, refers to primary tumors that have the capacity of metastasis with loss of growth control and positional control.

[0111] As used herein, metastasis refers to a growth of abnormal or neoplastic cells distant from the site primarily involved by the morbid process.

[0112] As used herein, proliferative disorders include any disorders involving abnormal proliferation of cells, such as, but not limited to, neoplastic diseases.

[0113] As used herein, a method for treating or preventing neoplastic disease means that any of the symptoms, such as the tumor, metastasis thereof, the vascularization of the tumors or other parameters by which the disease is characterized are reduced, ameliorated, prevented, placed in a state of remission, or maintained in a state of remission. It also means that the indications of neoplastic disease and metastasis can be eliminated, reduced or prevented by the treatment. Non-limiting examples of the indications include uncontrolled degradation of the basement membrane and proximal extracellular matrix, migration, division, and organization of the endothelial cells into new functioning capillaries, and the persistence of such functioning capillaries.

[0114] As used herein, an anti-cancer agent or compound (used interchangeably with “anti-tumor or anti-neoplastic agent”) refers to any agents, or compounds, used in anti-cancer treatment. These include any agents, when used alone or in combination with other compounds, that can alleviate, reduce, ameliorate, prevent, or place or maintain in a state of remission of clinical symptoms or diagnostic markers associated with neoplastic disease, tumors and cancer, and can be used in methods, combinations and compositions provided herein. Exemplary anti-cancer agent agents include, but are not limited to, the viruses provided herein used singly or in combination and/or in combination with other anti-cancer agents, such as cytokines, growth factors, hormones, photosensitizing agents, radionuclides, toxins, prodrug converting enzymes, anti-metabolites, signaling modulators, anti-cancer antibiotics, anti-cancer antibodies, anti-cancer oligopeptides, angiogenesis inhibitors, radiation therapy, hypothermia therapy, hyperthermia therapy, laser therapy, chemotherapeutic compounds, or a combination thereof.

[0115] As used herein, a prodrug is a compound that, upon in vivo administration, is metabolized or otherwise converted to the biologically, pharmaceutically or therapeutically active form of the compound. To produce a prodrug, the pharmaceutically active compound is modified such that the active compound is regenerated by metabolic processes. The prodrug can be designed to alter the metabolic stability or the transport characteristics of a drug, to mask side effects or toxicity, to improve the flavor of a drug or to alter other characteristics or properties of a drug. By virtue of knowledge of pharmacodynamic processes and drug metabolism in vivo, those of skill in this art, once a pharmaceutically active compound is known, can design prodrugs of the compound (see, e.g., Nogrady (1985) Medicinal Chemistry A Biochemical Approach, Oxford University Press, New York, pages 388-392).

[0116] As used herein the term assessing or determining is intended to include quantitative and qualitative determination in the sense of obtaining an absolute value for the activity of a product, and also of obtaining an index, ratio, percentage, visual or other value indicative of the level of the activity. Assessment can be direct or indirect.

[0117] An oncolytic virus is a virus that preferentially replicates in, and kills, neoplastic or cancer cells. The virus can be a naturally-occurring virus or an engineered virus. Preferably, the virus is a modified vaccinia virus.

[0118] As used herein, the phrase “immunoprivileged cells and tissues” refers to cells and tissues, such as solid tumors and wounded tissues, which are sequestered from the immune system.

[0119] As used herein, an array refers to a collection of elements, such as proteins, nucleic acids, cells or viruses, containing three or more members. An addressable array is one in which the members of the array are identifiable, typically by position on a solid phase support or by virtue of an identifiable or detectable label, such as by color, fluorescence, electronic signal (i.e. RF, microwave or other frequency that does not substantially alter the interaction of the molecules of interest), bar code or other symbology, chemical or other such label. Hence, in general the members of the array are immobilized to discrete identifiable loci on the surface of a solid phase or directly or indirectly linked to or otherwise associated with the identifiable label, such as affixed to a microsphere or other particulate support (herein referred to as beads) and suspended in solution or spread out on a surface.

[0120] The term “array” is to be construed broadly, and includes any arrangement wherein a plurality of different polypeptides are held, presented, positioned, situated, or supported. Arrays can include microtiter plates, such as 48-well, 96-well, 144-well, 192-well, 240-well, 288-well, 336-well, 384-well, 432-well, 480-well, 576-well, 672-well, 768-well, 864-well, 960-well, 1056-well, 1152-well, 1248-well, 1344-well, 1440-well, or 1536-well plates, tubes, slides, chips, flasks, or any other suitable laboratory apparatus. Furthermore, arrays can also include a plurality of sub-arrays. A plurality of sub-arrays encompasses an array where more than one arrangement is used to position the polypeptides. For example, multiple 96-well plates could constitute a plurality of sub-arrays and a single array.

[0121] As used herein, an address refers to a unique identifier whereby an addressed entity can be identified. An addressed moiety is one that can be identified by virtue of its address. Addressing can be effected by position on a surface or by other identifiers, such as a tag encoded with a bar code or other symbology, a chemical tag, an electronic, such RF tag, a color-coded tag or other such identifier.

[0122] As used herein, “a combination” refers to any association between two or among more items. Such combinations can be packaged as kits.

[0123] As used herein, a composition refers to any mixture. It can be a solution, a suspension, an emulsion, liquid, powder, a paste, aqueous, non-aqueous or any combination of such ingredients.

[0124] As used herein, fluid refers to any composition that can flow. Fluids thus encompass compositions that are in the form of semi-solids, pastes, solutions, aqueous mixtures, gels, lotions, creams and other such compositions.

[0125] As used herein, a kit is a packaged combination, optionally, including instructions for use of the combination and/or other reactions and components for such use.

[0126] The section headings used herein are for organizational purposes only and are not to be construed as limiting the described subject matter in any way. All literature and similar materials cited in this application, including but not limited to, patents, patent applications, articles, and books are expressly incorporated by reference in their entirety for any purpose where permitted. It is to be understood that the foregoing general description and the following detailed description are exemplary and explanatory only and are not restrictive. The articles “a” and “an” are used herein to refer to one or to more than one (i.e., to at least one) of the grammatical object of the article. By way of example, “an element” means one element or more than one element. Further, unless otherwise required by context, singular terms shall include pluralities and plural terms shall include the singular.

[0127] As used herein, “comprising” as used herein is synonymous with “including,” “containing,” or “characterized by,” and is inclusive or open-ended and does not exclude additional, unrecited elements or method steps.

[0128] All numbers expressing quantities are to be understood as being modified in all instances by the term “about.” The word “about” carries the understanding that the number referred to can vary by up to ±10%, unless indicated otherwise in the text or as understood in the art, and still remain within the meaning of the disclosure. At the very least, and not as an attempt to limit the application of the doctrine of equivalents to the scope of the claims, each numerical parameter should be construed in light of the number of significant digits and ordinary rounding approaches.

[0129] Generally, nomenclature used in connection with, and techniques of, cell and tissue culture, molecular biology, and protein and oligo- or polynucleotide chemistry and hybridization described herein are those well known and commonly used in the art. The techniques and procedures described herein are generally performed according to conventional methods well known in the art and as described in various general and more specific references that are cited and discussed throughout the instant specification, for example, Sambrook et al., Molecular Cloning: A Laboratory Manual (Third ed., Cold Spring Harbor Laboratory Press, Cold Spring Harbor, N.Y. 2000). The nomenclatures utilized in connection with, and the laboratory procedures and techniques described herein are those well known and commonly used in the art.

### B. METHODS FOR ASSESSING VIRAL THERAPY

[0130] Provided herein are methods and compositions for viral therapy. Methods to predict or assess or determine a subject's, such as a subject with a tumor or cancer, response to viral therapy are provided. The methods include assessing whether a subject bearing a tumor is likely to respond to treatment of the tumor with a therapeutic virus. In some examples, the methods include measuring a replication indicator that is predictive for tumor response to viral therapy. In some examples, markers for use in assessing responses to viral therapy are provided. Therapeutic viruses designed for viral therapy also are provided elsewhere herein.

[0131] Also provided herein are methods to identify markers associated with a subject's response to viral therapy. In some examples, methods to assess a candidate therapeutic virus are provided. Methods for administering viral therapy to a subject also are provided. In further examples, methods to monitor the progress of viral therapy in a subject are provided. Also provided are pharmaceutical compositions containing a therapeutic virus. In some examples, kits to measure markers are provided.

[0132] 1. Methods of Assessing Whether a Subject is Likely to Respond Favorably or Poorly to Viral Therapy by Assessing a Replication Indicator

[0133] Provided herein are methods of assessing the likely response of a tumor to treatment with a therapeutic virus by assessing a replication indicator. As described herein, virus replication patterns in tissue cultures can be used to predict in vivo viral therapeutic effects. For example, a tissue or cell sample can be obtained (e.g., biopsy) from a subject (e.g., human or non-human animal subject), and the sample can be infected with one or more types of viruses. Based on the replication patterns of the one or more viruses, therapeutic effects of those viruses on the tissue or cells (from which the sample was obtained) can be predicted. In some examples, such prediction can be a binary prediction, indicating whether the tissue or cells of interest will be a responder type or a non-responder type.

[0134] As described herein by examples, known tumor cell lines can be characterized, for examples, as responders or non-responders for various types of viruses. Such information can be stored in a database in known manners. During a viral therapy planning phase, such database can be utilized to customize a treatment if information about the to-be-treated tumor cell line is available. In some example the database can be used as a standard by to compare a replication indicator determined from a tumor sample obtained from a subject.

[0135] If information about the particular tumor type is uncertain or not known, prediction of therapeutic effects can be made by obtaining replication patterns of one or more viruses in a culture of a sample obtained from the subject (e.g., tumor biopsy). For example, a sample can be obtained from a patient, and be infected by one or more viral candidates. After a certain period, replication indicator, such as changes in viral titer or relative gene expression, can be obtained; and based on such indicator values, prediction as to therapeutic effect of each of the viral candidates can be made.

[0136] In some examples, determination of the replication indicator in the tissue or cell sample can be achieved via an array having different types of viruses, or an array capable of receiving such viruses for infection. In some examples, a panel of one or more candidate viruses in an array is assayed. In some examples, one or more cell types or tumor samples are assayed. The tumor samples can include known responders, known non-responders or unknown responders or non-responders, or a combination thereof. In some examples, such an array can be a microarray. In some example, replication indicators from the array can be at least partially automated or controlled by a computing device.

[0137] In some embodiments, such period for determining viral replication patterns can be in a range of approximately zero to 10 days, zero to 5 days, zero to 2 days, zero to 1 day, zero to 2 days or more. Other ranges of such period also are possible. Viral titers can also be assayed at any time point during the experiment. In some examples, a replication indicator such as viral titer can be obtained at approximately 24 hours after infection. In other examples the virus titer is assayed before 24 hours, such as for example 6 hours or more or 12 hours of more.

[0138] In some viruses, period associated with lagging of viral replication in non-responders may vary. Accordingly, such variations can be accounted for in forming predictions of therapeutic effects.

[0139] In some applications, replication indicators can include assaying viral titer performed using a standard method, such as by plaque assay. In some examples, viruses can encode other gene products whose expression can be used as an indicator of viral replication, such as, for example, but not limited to, proteins that emit light. In some examples, the virus can encode a protein such as a fluorescent protein or a luciferase or a combination thereof. In one example, the virus is vaccinia virus, such as GLV-1h68. Other replication indictors include but are not limited to detection of changes in viral gene expression or host gene expression.

[0140] As described herein, obtaining the viral replication patterns relatively early after infection (around 24 hours post infection) can provide a replication index indicative of therapeutic effect of the virus against a particular tumor of tumor type. Such indices can be assigned for a given combination of virus and cell line. In some examples, such a therapeutic index can be within a finite range of values.

[0141] The therapeutic index can be formed, for example, by plotting a curve of the relative change in tumor volume against time after virus injection and a curve of the change in tumor volume during the same time period in the absence of virus. The untreated control curve represents the relative change in tumor volume without virus treatment; and the virus treatment curve represents the relative change in tumor volume with virus treatment. Such studies can be performed in well-recognized tumor xenograft models as described herein.

[0142] One example way of forming a therapeutic index is to determine or estimate a quantity given by

therapeutic index=(A−B)/A (Eq. 1)

where A is the area under the untreated control curve, and B is the area under the virus treatment curve, with both as from time T0 to T. The time T0 can be the time when virus is introduced to the tumor-bearing subject, and can be measured in appropriate time scale such as days.

[0143] The exemplary therapeutic index ((A−B)/A) can generally provide a range of values between approximately zero and one. For example, if the value of B is relatively low (where tumor volume increase is relatively low followed by a decrease in volume), the therapeutic index is closer to one. On the other hand, if the value of B is relatively high (where tumor volume increase is relatively high), the therapeutic index is closer to zero. In some examples, the use of integrated values (e.g., areas under curves) associated with curves can average out fluctuations that may be present in the curves, which thereby yields a more accurate representation of the therapeutic index. Also, in some examples, normalizing the therapeutic index, such as in the examples provided herein, can facilitate a more meaningful comparison of various combinations of viruses and cell lines.

[0144] In some embodiments, various concepts of the present disclosure can be utilized for applications such as cancer treatment planning and/or patient screening. For example, a biopsy can be performed on a patient, and the sample tissue can be prepared for infection. A biopsy sample may contain cancerous and healthy cells. Thus, such preparation can include a step where, for example, healthy cells are allowed to die off in a known manner (e.g., over a period such as one week). Various known techniques can be utilized to increase the relative number of cancerous cells in the biopsy sample prior to viral infection.

[0145] A replication indicator can be any parameter that correlates with the ability of a therapeutic virus to replicate efficiently in a tumor. As described herein and in the Examples, delayed replication of a virus in vitro in a tumor cell is indicative of the inability of the virus to cause tumor regression in vivo. Likewise, efficient and early replication of the virus following infection of a tumor cell in vitro is indicative of a favorable response to tumor therapy by the virus in vivo.

[0146] a. Virus Titer

[0147] Determination of virus titer can be used a replication indicator. In some examples, cells obtained from a biopsy can be infected (e.g., 0.01 MOI) with a therapeutic virus (e.g., GLV-1h68). Such infected cells can be assayed for viral titer after a selected time (e.g., 24 hours), and such viral titer can be used to predict the therapeutic index of the therapeutic virus on the tumor or cancerous cells associated with the biopsied cells.

[0148] In some examples, a threshold value can be assigned to allow prediction of responsiveness or non-responsiveness of a particular tumor. A threshold value can be assigned at, for example, a viral titer value between 4.00 and 4.50 log pfu/10⁶ above which a particular tumor is classified a responder.

[0149] As shown in the examples provided, where the therapeutic index values are constrained in a finite range, the slopes of lines increase as the viral titer time (post infection) increases. It is therefore advantageous to have as large a range of viral titer values as possible so as to allow better separation of such values. In the examples provided, the 24 time point following infection of the tumor cells provided the largest range of viral titer values among the three example times assayed (24, 48, and 72 hours), thereby allowing more effective separation and classifying of cell lines.

[0150] In the example data described herein, the 24-hour viral titer provides a relatively convenient and fast method for obtaining sufficient replication statistics for the purpose of classifying tumor cells as better responders or poorer responders to the candidate virus (e.g. GLV-1h68). It will be understood, however, that other viral titer times can be selected for other viruses and/or cell lines. For example, earlier or later time points such as for example around 12 hour to around 36 hours can be assayed in order to classify the candidate viruses as responder or non responders.

[0151] In the examples provide herein, the multiplicity of infection employed MOI was 0.01. It is understood, however, that other MOI can be selected to allow better separation of viral titer values, such as for example in the range of around 0.001 MOI-1 MOI.

[0152] In some examples, the viral titer of the biopsy sample can be accompanied by one or more controls. In some examples, one or more known cell lines can be infected and assayed along with the cells from the biopsy. For example, known cell lines that are responders such as, for example, PANC-1 and GI-101A, and/or non responders, such as for example, PC-3 and MB-231 can be used as control(s). Viral titer from the biopsied cells, normalized in an appropriate manner, can be compared with titers from the known cell line(s). If the biopsied cells' viral titer is less than or equal to that of PC-3, for example, such cells can be considered to be potential poorer responders; and if the biopsied cells' viral titer is greater than or equal to that of PANC-1, for example, such cells can be considered to be potential better responders. If the biopsied cells' viral titer is between the values of PC-3 and PANC-1, a classification can be made which may include consideration of other factors.

[0153] b. Expression of Virus Genes

[0154] Another exemplary replication indicator can be a change in the expression of overall expression of vaccinia viral genes. As described in the examples provided herein, the overall expression of vaccinia viral genes was upregulated in the responder tumor cells compared to the non-responder cells at 24 hours post viral infection. Thus, an assay for one or more viral genes or a panel of viral genes can be performed in order to determine whether the virus efficiently replicates in the tumor cell type. If the infected tumor cell exhibits an increase in viral gene expression, the tumor cell can be classified as a predicted responder to viral therapy. In the methods provided herein, one or more viral genes can be assessed to determine the level of viral gene expression in the infected tumor cells. For example, 1, 2, 3, 4, 5 or more, 10 or more, 50 or more 100 or more housekeeping genes can be assessed. Exemplary viral genes that can be assayed for oncolytic viruses, such as vaccinia viruses, are provided elsewhere herein. Such viral genes can be arrayed on microarrays and micro array analysis can be performed to determine the level of viral gene expression using standard techniques well known in the art and described elsewhere herein.

[0155] c. Decreased Expression of Housekeeping Genes

[0156] An additional exemplary replication indicator provided herein is the downregulation housekeeping genes in the tumor cell. Previous studies have shown that housekeeping genes are dysregulated in tumors infected with viruses indicative of the infected host shutdown of cellular functions due to the increased energy demands of the infecting virus (Guerra, S (2007) J Virol. 81:8707-8721). As described herein, the nearly all of the housekeeping genes in a responder tumor tested had decreased expression within 24 hours of viral infection. Housekeeping gene expression was not altered in the non-responder tumor during the same period (see Examples).

[0157] In the methods provided herein, one or more housekeeping genes can be assessed to determine whether the level of expression decreases in the presence of the virus. For example, 1, 2, 3, 4, 5 or more, 10 or more, 50 or more 100 or more housekeeping genes can be assessed. Exemplary housekeeping genes include, but are not limited to ACTB, ALDOA, GAPD, PGK1, LDHA, RPS27A, RPL19, RPL11, NONO, GDI, ARHGDIA, RPL32, RPS18, HSPCB, ILF2, USP11, ATP6V1G1, A1S9T, UBE1, CSNK2B, CPNE1, TNFRSF5, CTNNB1, EIF3S7, NDUFA1, ARAF1, SAFB, ATP6IP1, H2BFL, COX7A2L, ENSA, BTF3, ETR, ATP5J2, SFRS9, G10, CSTB, SLC9A3R2, TETRAN, VEGFB, STK24, RAD9, EFNA3, ARHGAP1, TAPBP, BAT1, TKT, HLA-C, RAB1A, UBE2D2, UBE2M, GNAS, PTBP1, RPL36AL, C21orf33, GPI, COX7C, EIF4A2, COX6B, FBR-MuSV, FAU, GRIK5, COX5B, COX5A, CDC10, VAMP3, GPAA1, PABPN1, HSBP1, YARS, UBE2I, PABPC1, GCN5L1, COX4I1, SPAG7, PSMD8, ZFP36L1, ODC1, RPL18, RPL13, RPS11, CCND3, RPL14, PSMD11, TPMT, RPL8, MTA1, COL6A1, AP2M1, ATP5D, STK19, RPS25, RPS19, MAPKAPK2, AIF1, C14orf2, MAP4, RPS9, B4GALT3, CCBP2, RPS5, TPR-containing SGT, H6PD, MMPL1, E2F4, ADAM15, ADD1, ADAR, PAX8, ANXA6, CHIT1, TAGLN, FOLR1, ACTN4, RING1, ACVRL1, CDA, PTTG1IP, BCRP1, JAG1, ID3, ARHA, SULT1A3, CANX, ARF5, ARF4, ARF1, TSTA3, GDI2, SSR2, ADRBK1, ELAVL3, CAPZB, SNRPA, SDHA, PPP2CB, PITPNM, ILK, HDGF, GGTLA1, NEDD5, DAP, CSK, COX8, ANXA2, SSTR5, CTBP1, CHD4, ZNF91, ZNF91, TTC1, TEGT, SRM, SGSH, PSME2, PRKAG1, PGD, PRDX1, NM23B, MTX1, MSN, MC2R, LTBP4, LMO1, IMPDH2, IFITM1, GRM4, GNAI2, GDI1, GAS1, FTH1, EIF4G2, DAXX, CNTN1, BSG, ARL2, ARF3, DNCL1, HLA-G, HGS, C11orf13, ATP5A1, CSNK1E, SNX3, CTSD, PSMA7, PSMB7, LDHB, SREBF1, PSMB4, PSMB2, PSMB1, MYH9, CENPB, PFDN5, SYNGR2, AP1B1, H3F3A, ARHGEF7, YWHAZ, MAP3K11, AES, VIL2, PHF1, PFDN1, CKB, YWHAH, RNH, SLC25A11, CYC1, PTMA, SNRPG, TUFM, YWHAB, RPA2, CD81, CALM2, ATP6V1F, H2AFY, NDUFB7, HMGB1, CD23A, FCER2, GUK1, G22P1, BECN1, MCM3AP, CSF1, HPCAL1, ATP6V0C, ATP6V0B, ATP6V1E1, COX7A2, COX6A1, FKBP1A, RPL29, RPL27, RPLP2, RPLP1, GM2A, RPL3, ENO1, RPL38, RPL37, RPL34, RPL15, RPS2, RPS24, RPS16, RPS15, RPS13, RPL5, RPL17, POLR2A, RPS12, HNRPK, HNRPD, HNRPAB, RPS10, MAZ, MYC, FBL, AP2S1, ACTG1, M6PR, SNRPD2, LGALS9, DIA1, COMT, MGAT1, EIF3S8, DDT, FUS, ALTE, RRBP1, NDUFS5, ERH, B2M, LYZ, NM23A, MVK, ENTPD6, UQCRC1, TXN, TUBB, TCOF1, SRP14, SRF, SOD1, SNRPB, SNRP70, SFRS2, RPS6 KB2, RPN1, PRKCSH, PNMT, PKM2, PIM1, SLC25A3, NDUFC1, NDUFA2, MPG, MIF, JAK1, HRMT1L2, GPX4, GP2, GOT2, EXTL3, EIF3S5, EIF3S4, EIF3S2, DHCR7, DAD1, CYB5, CLTB, CLTA, CKAP1, CAPNS1, ATP50, ATP5G3, ATF4, APLP2, ZNF, DNAJB6, HSPA8, PHGDH, RAP1B, SKIP, MBC2, SAP18, COPS6, ARPC4, ARPC3, NSAP1, BMI1, TERF2IP, ARPC2, STARD7, FEZ1, FBXO7, PLSCR3, PDAP1, DXSE, ST5, PRPH, ZNF, RAGA, C1D, GABARAPL2, TADA3L, SEC61G, HAX1, DNPEP, CGI-57, DKFZPK, MGC, M9, AF69, PRO, FLJ3, TRAP1, KIAA, COPE, CG1I, UQCRH, NOT56L, H2AV, PLXNB2, DJ-1, REA, UBC, MACMARCKS, COBRA1, RAD23A, UQCR, GPR56, RERE, KIFC3, MCL1, PPP1R11, QP-C, HBOA, TUBB4, KIAA, MGC, HLA-DRB4, RFP, DNAJB1, RNPS1, CGB7, TIMM44, SIAHBP1, BART1, AFG3L2, MFN2, RUVBL2, DIAPH1, MLC-B, MGC, FLJ2, TMSB10, HCDI, PTOV1, KIAA, KIAA, RE2, NEDD8, CCT7, SARS, PFN1, SDC3, RPL35, K-ALPHA-1, NXF1, SLC6A7, AGPAT1, MRPL23, POLR2F, SEC61B, RPS14, HNRPH1, TALDO1, ARMET, DXYSE, PTDSS1, FOXM1, RAC1, VAMP1, KIAA, ABL1, RAN, A2LP, RTN4, ZFPL1, JTB, NUDT3, CPNE6, PGPL, TIP-1, FCGR2A, JUND, NFKBIA, LAMP1, KIAA, MEA, BC-2, CIZ1, ASE-1, CALM1, RBPMS, RBM3, CRF, VARS2, TACC1, PIN1, LASP1, MT3, UQCRFS1, CCT3, TCFL1, SLC6A8, KARS, ISLR, CFL1, NCL, MLF2, PRPF8, TOM7, MRC2, AKR1A1, LQFBS-1, GNB2L1, MLN51, HSGP25L2G, BRMS1, APOBEC3C, UBB, CREB3, RANBP16, MRPL9, PDCD6, MDH1, JAM3, MAP2K2, REQ, YWHAQ, MGC3, FLJ4, SLC25A1, FLJ2, SAR1, G2AN, PPP2R1A, SMT3H2, TSFM, HSPA5, TMEM4, RNP24, MAPK8IP1, GNB2, LYPLA2, NDUFV1, BTBD2, ANAPC5, SUI1, DDOST, PKD2, DRAP1, MYL6, WDR1, MEL, TLN1, SCAMP3, CDC2L2, RBM8A, RPL10, SDCCAG33, RPL10A, TRIM28, AATF, P-RHO-GEF, RPL13A, POLR2L, NIFIE14, XBP1, HYOU1, C9orf16, C12orf8, FLJ7, GSK3A, MRPS12, NDUFV2, CLSTN1, DAZAP2, HSA16, DKK4, PAK-4, PRKCABP, ZNF, TCEB2, GABARAP, ATP5I, SMT3H1, IDH3B, KDELR1, KIF1C, TUBGCP2, API5, ANP32B, RABAC1, HIS1, ATP5H, ACAT2, SRRM1, NACA, HINT1, ATP5G1, ALDOC and NDUFA (Eisenberg and Levanon (2003) Trends in Genetics 19, 362-365). Such housekeeping genes can be arrayed on microarrays and microarray analysis to measure gene expression can be performed using standard techniques well known in the art and described elsewhere herein.

[0158] Any method known in the art can be used for assessing the expression of housekeeping genes in a tumor. For example, methods for measuring protein expression levels which can be used include, but are not limited to, microarray analysis, ELISA assays, Western blotting, or any other technique for the quantitation of specific proteins. For RNA levels, examples of techniques which can be used include microarray analysis, quantitative PCR, Northern hybridization, or any other technique for the quantitation of specific nucleic acids.

[0159] In an exemplary method provided herein includes contacting a tumor sample with the virus for a period of time in vitro and measuring the level of expression of one or more housekeeping genes compared to level of the one or more housekeeping genes in a second tumor sample. Decreased expression of the one or more housekeeping genes is indicative of a favorable response to tumor therapy.

[0160] d. Expression of Tumor Proteins

[0161] As described herein, the level of one or more tumor proteins can be upregulated or down regulated in response to viral infection. Thus, measuring the level of expression of such protein can be a indicator of efficient viral replication in the tumor cell. Examples of such proteins are provided elsewhere herein and in the examples. In an exemplary method, a tumor cell is infected with a virus and the level of gene expression in the tumor is measured compared to the level of gene expression in the tumor in the absence of the virus. An increase or decrease in the level of gene expression in a tumor can be compared to the pattern of gene expression obtained when a responder is infected with a therapeutic virus versus the pattern of gene expression obtained when a non-responder is infected with a virus. Comparison of the patterns of gene expression will allow one classify the tumor as one likely to respond favorably to tumor therapy.

[0162] Any method known in the art can be used for assessing the level of gene expression in a tumor. For example, methods for measuring protein expression levels which can be used include, but are not limited to, microarray analysis, ELISA assays, Western blotting, or any other technique for the quantitation of specific proteins. For RNA levels, examples of techniques which can be used include microarray analysis, quantitative PCR, Northern hybridization, or any other technique for the quantitation of specific nucleic acids.

[0163] 2. Methods of Assessing Whether a Subject is Likely to Respond Favorably or Poorly to Viral Therapy by Marker Expression Profiling

[0164] Methods of assessing whether a subject is likely to respond favorably or poorly to viral therapy are provided. Such methods can be used to determine whether to administer viral therapy to a subject or whether to utilize a therapeutic approach other than viral therapy. In some examples, such methods can be used to determine the type of therapeutic virus to administer to a subject.

[0165] In some examples, a marker profile of a cell contacted with a therapeutic virus can be used to assess whether a subject is likely to respond favorably or poorly to viral therapy. In some examples, a marker profile of a cell not contacted with a therapeutic virus can be used to assess whether a subject is likely to respond favorably or poorly to viral therapy. A marker profile can be obtained by determining whether the level of expression of a plurality of markers indicative of a favorable or poor response to viral therapy is altered when a biological sample, such as a tumor sample, from the subject is contacted with a therapeutic virus. Markers can include markers whose expression is altered in cells that are known to respond favorably to viral therapy; markers whose expression is altered in cells that are known to respond poorly to viral therapy; and markers whose expression is known to remain substantially the same in cells which respond favorably or poorly to viral therapy. In some examples, the cells which respond favorably to viral therapy are cells which permit replication of the therapeutic virus following infection. In some examples, the cells which respond poorly to viral therapy are cells in which the therapeutic virus replicates poorly. In some examples, markers can include markers for which an increased level of expression is indicative of a favorable or poor response to viral therapy, markers for which a decreased level of expression is indicative of a favorable or poor response to viral therapy or markers for which a substantially unchanged level of expression is indicative of a favorable or poor response to viral therapy. For example, some of the markers can be one or more of those listed in Table 1, Table 2, and Table 3.

TABLE 1
Markers For Which an Increased Expression Level is
Indicative of a Favorable Response to Viral Therapy

| | SEQ ID No. |
|---|---|
| IL-18 (Interleukin-18) | 407 |
| MCP-5 (Monocyte Chemoattractant Protein-5; CCL12) | 52 |
| IL-11 (Interleukin-11) | 35 |
| MCP-1 (Monocyte Chemoattractant Protein-1) | 50, 135 |
| MPO (Myeloperoxidase) | 53, 136 |
| Apo A1 (Apolipoprotein A1) | 3, 72 |
| TIMP-1 (Tissue Inhibitor of Metalloproteinase Type-1) | 62, 449 |
| CRP (C Reactive Protein) | 5, 77 |
| Fibrinogen | 13, 97 |
| MMP-9 (Matrix Metalloproteinase-9) | 49, 134 |
| Eotaxin (CCL11) | 10, 88 |
| GCP-2 (Granulocyte Chemotactic Protein-2; CXCL6) | 17 |
| IL-6 (Interleukin-6) | 32, 117 |
| Tissue Factor (TF) | 63, 151 |
| SAP (Serum Amyloid P) | 58, 143 |
| FGF-basic (Fibroblast Growth Factor-basic) | 15, 100 |
| MCP-3 (Monocyte Chemoattractant Protein-3; CCL7) | 51, 135 |
| IP-10 (CXCL 10) | 485 |
| MIP-2 | 47 |
| Thrombopoetin | 61, 147 |
| Cancer antigen 125 | 80 |
| CD40 | 6, 82 |
| CD40 ligand | 7, 83 |
| ENA-78 | 90 |
| Ferritin | 95 |
| IL-12p40 | 121 |
| IL-12p70 | 36, |
| IL-16 | 125 |
| MMP-2 | 132 |
| PAI-1 | 138 |
| TNF RII | 155 |
| TNF-beta | 154 |
| VCAM-1 | 65, 156 |

TABLE 2
Cell Markers For Which an Decreased Expression Level is
Indicative of a Favorable Response to Viral Therapy

| | SEQ |
|---|---|
| | ID No. |
| MIP-1beta (Macrophage Inflammatory Protein-1beta) | 45, 131 |
| MDC (Macrophage-Derived Chemokine; CCL22) | 43, 129 |
| MIP-1alpha (Macrophage Inflammatory Protein-1alpha; CCL3) | 44, 130 |
| KC/GROalpha (Melanoma Growth Stimulatory Activity Protein) | 39 |
| VEGF (Vascular Endothelial Cell Growth Factor) | 66, 157 |
| Endothelin-1 | 8, 87 |
| MIP-3 beta (Macrophage Inflammatory Protein-3 beta; | 48 |
| Exodus-3 or ELC) | |
| Beta-2 microglobulin | 75 |
| IL-5 (Interleukin-5) | 31, 116 |
| IL-1 alpha (Interleukin-1 alpha) | 26, 110 |
| EGF (Epidermal Growth Factor) | 89 |
| Lymphotactin (XCL1) | 41, 128 |
| GM-CSF (Granulocyte Macrophage-Colony Stimulating Factor) | 18, 103 |
| MIP-1gamma (Macrophage Inflammatory Protein-1gamma; | 46 |
| CCL4) | |
| IL-1beta (Interleukin-1 beta) | 27, 111 |
| Brain-derived neutrophic factor | 76 |
| Cancer antigen 19-9 | 79 |
| Carcinoembryonic antigen | 81 |
| C reactive protein | 5, 77 |
| EGF | 89 |
| Fatty acid binding protein | 94 |
| Factor VII | 12, 93 |
| Growth hormone | 104 |
| IL-1 alpha | 26, 110 |
| IL-1 beta | 27, 111 |
| IL-1 ra | 112 |
| IL-7 | 33, 118 |
| IL-8 | 119 |
| MDC | 43, 129 |
| Prostatic acid phosphatase | 141 |
| Prostate specific antigen, free | 140 |
| Stem cell factor | 60, 146 |
| Tissue factor | 63, 151 |
| TNF-alpha | 64, 153 |
| VEGF | 66, 157 |
| Von Willebrand factor | 67, 158 |

TABLE 3
Tumor Cell Markers For Which the Expression Level is Substantially
Unchanged in Cells Which Respond Favorably to Viral Therapy

| | SEQ ID No. |
|---|---|
| IgA (Immunoglobulin A) | 486 |
| Haptoglobin | 23, 105 |
| MIP-2 (Macrophage Inflammatory Protein-2) | 47, 132 |
| IL-17 (Interleukin-17) | 38 |
| SGOT (Serum Glutamic-Oxaloacetic Transaminase) | 59, 144 |
| IP-10 (Inducible Protein-10) | 485 |
| IL-10 | 34, 120 |
| FGF-9 (Fibroblast Growth Factor-9) | 16 |
| M-CSF (Macrophage-Colony Stimulating Factor) | 42 |
| IL-4 (Interleukin-4) | 30, 115 |
| IL-3 (Interleukin-3) | 29, 114 |
| TPO (Thrombopoietin) | 61, 147 |
| SCF (Stem Cell Factor) | 60, 146 |
| LIF (Leukemia Inhibitory Factor) | 40 |
| IL-2 (Interleukin-2) | 28, 113 |
| VCAM-1 (Vascular Cell Adhesion Molecule-1; CD106) | 65, 156 |
| TNF alpha | 64, 153 |
| OSM (Oncostatin M) | 55 |

[0166] In some examples, the expression profile for a tumor that is responsive to tumor therapy can be compared to the expression profile for a tumor that is non-responsive to viral therapy in the absence of any viral treatment. As described herein and in the examples, tumors that are non-responsive to tumor therapy have increased expression of markers that are predictive of whether the tumor will respond to viral therapy. Such markers can be employed to assess whether a particular tumor will be responsive to tumor therapy. Listed in Table 4 are marker where increased expression is indicative of a poor response to therapy. Such markers include but are not limited to Beta-2 Microglobulin, Brain-Derived Neurotrophic Factor, Cancer Antigen 19-9, Carcinoembryonic Antigen, C Reactive Protein, EGF, Fatty Acid Binding Protein, Factor VII, Growth Hormone, GM-CSF, IL-1 alpha, IL-1 beta, IL-1 ra, IL-7, IL-8, Prostatic Acid Phosphatase, Prostate Specific Antigen, Stem Cell Factor, TNF-alpha, and VEGF.

TABLE 4
Tumor Markers For Which an Increased Expression Level is Indicative
of a Poor Response to Viral Therapy

| | SEQ ID No. |
|---|---|
| Beta-2 Microglobulin | 75 |
| Brain-Derived Neurotrophic Factor | 76 |
| Cancer Antigen 19-9 | 79 |
| Carcinoembryonic Antigen | 81 |
| C Reactive Protein | 5, 77 |
| EGF | 89 |
| Fatty Acid Binding Protein | 94 |
| Factor VII | 12, 93 |
| Growth Hormone | 104 |
| GM-CSF | 18, 103 |
| IL-1alpha | 26, 110 |
| IL-1beta | 27, 111 |
| IL-1ra | 112 |
| IL-7 | 33, 118 |
| IL-8 | 119 |
| Prostatic Acid Phosphatase | 141 |
| Prostate Specific Antigen | 140 |
| Stem Cell Factor | 60, 146 |
| TNF-alpha | 64, 153 |
| VEGF | 66, 157 |

[0167] Methods to determine whether a subject is likely to have a favorable or a poor response to viral therapy can include one or more steps. In some examples, a biological sample, such as a tumor sample, from the subject is contacted with a therapeutic virus. In such examples, the level of expression of at least one marker in the biological sample, such as a tumor sample, contacted with the virus is assessed to determine whether the level of expression is altered in response to the therapeutic virus. If the expression level of the at least one marker is indicative of a favorable response to viral therapy, viral therapy with the therapeutic virus can be performed on the subject. If the expression level of the at least one marker is indicative of a poor response to viral therapy, a therapeutic approach other than viral therapy can be employed for the subject. In some examples, such methods can include obtaining a biological sample from the subject, for example, a biopsy of a tumor; measuring the level of expression of at least one marker in a first biological sample; measuring the level of expression of the same at least one marker in a second biological sample contacted with a therapeutic virus; and determining whether the level of expression of the at least one marker has increased, decreased or remained substantially the same in response to contacting the biological sample with the therapeutic virus. Alternatively, for this method and any of the methods described herein, rather than comparing the level of expression in contacted or non-contacted samples, the level of expression in the contacted biological sample or cells can be compared to a previously determined expression level which has been shown to be an accurate baseline expression level for uncontacted biological samples or cells.

[0168] In some examples, the at least one marker can be selected from the markers listed in Table 1, Table 2 and Table 3. In some examples, the at least one marker encompasses a plurality of markers selected from the markers listed in Table 1, Table 2, or Table 3. In some examples the expression level of at least 1, at least 5, at least 10, at least 15, at least 20 markers, or more than 20 markers selected from the markers listed in Table 1, Table 2 and Table 3 can be determined. In some examples, the expression levels of all the markers of Table 1, Table 2, and Table 3 can be determined.

[0169] The at least one marker can be a marker identified by methods described herein. In some examples, the marker can be a marker for which the level of expression is indicative of a favorable or poor response to viral therapy. In some examples, the marker can be a marker for which the level of expression is associated with good or poor replication of the virus in a biological sample.

[0170] In some examples, a single biological sample, such as a tumor sample, is obtained and divided into two test samples. One test sample is not contacted with the virus, while the other test sample is contacted with the virus. The level of expression of the marker in the two portions is compared. In other examples, the second biological sample, such as a second tumor sample, can be a portion of the first biological sample or from the same source as the first biological sample.

[0171] Methods to determine whether a subject is likely to have a favorable or a poor response to viral therapy can include culturing a biological sample, such as a tumor sample, contacted with a therapeutic virus, prior to measuring the level of expression of at least one marker. In some examples, the biological sample, such as a tumor sample, can be cultured in vitro according to methods known in the art. Alternatively, the biological sample, such as a tumor sample, can be cultured in vivo. In such methods, the biological sample, such as a tumor sample, can be implanted subcutaneously into an organism, such as a nude mouse. Where the biological sample is cultured in vivo, the level of expression can be measured for markers of the host organism, and for markers of the biological sample.

[0172] The biological sample, such as a tumor sample, contacted with the therapeutic virus can be cultured for a period of time sufficient to detect a response to the virus. In some examples, the period of time can be determined by the sensitivity of the method used to measure the level of expression of at least one marker. For example, the biological sample, such as a tumor sample, contacted with the therapeutic virus can be cultured for about 30 minutes, about 1 hour, about 6 hours, about 12 hours, about 1 day, about 2 days, about 3 days, about 4 days, about 5 days, about 6 days, about 7 days, about 8 days, about 9 days, about 10 days, about 11 days, about 12 days, about 13 days, about 14 days, about 2 weeks, about 3 weeks, about 4 weeks, or about 1 month.

[0173] The measurement of the level of expression of at least one marker can be carried out using methods well known in the art. Examples of methods for measuring protein expression levels which can be used include, but are not limited to, microarray analysis, ELISA assays, Western blotting, or any other technique for the quantitation of specific proteins. For RNA levels, examples of techniques which can be used include microarray analysis, quantitative PCR, Northern hybridization, or any other technique for the quantitation of specific nucleic acids.

[0174] In some examples of the methods for assessing whether a subject is likely to respond favorably or poorly to viral therapy described herein, the step of determining whether the level expression of the at least one marker in a biological sample, such as a tumor sample, contacted with a therapeutic virus has decreased, increased, or remained substantially the same, as compared to the expression of the same at least one marker in a non-contacted biological sample can be performed by comparing quantitative or semi-quantitative results obtained from the determining step. In some examples, a difference in expression of the same marker between the contacted and non-contacted biological samples of about less than 2-fold, about 2-fold, about 3-fold, about 4-fold, about 5-fold, about 6-fold, about 7-fold, about 8-fold, about 9-fold, about 10-fold, about 20-fold, about 30-fold, about 40-fold, about 50-fold, about 60-fold, about 70-fold, about 80-fold, about 90-fold, about 100-fold or greater than about 100-fold is indicative of a favorable or poor response to viral therapy. For markers for which a substantially unchanged level of expression is indicative of a favorable or poor response to viral therapy, the difference in expression of the same marker between the contacted and non-contacted samples can be less than about 2-fold, less than about 1.5 fold, or less than about 1.

[0175] In examples where the at least one marker is selected from Table 1, an increase in expression of the selected marker in a contacted biological sample, such as a tumor sample, as compared to expression of the same marker in a non-contacted biological sample can indicate that the subject is likely to respond favorably to viral therapy. Conversely, no increase can indicate that the subject is likely to have a poor response to viral therapy. In examples where the at least one marker is selected from Table 2, a decrease in expression of the selected marker in a contacted biological sample as compared to expression of the same marker in a non-contacted biological sample can indicate that the subject is likely to respond favorably to viral therapy. Conversely, no decrease can indicate that the subject is likely to have a poor response to viral therapy. In examples where the at least one marker is selected from Table 3, no substantial change in the level of expression of the selected marker in a contacted biological sample as compared to expression of the same marker in a non-contacted biological sample can indicate that the subject is likely to respond favorably to viral therapy. In some examples where the at least one marker is selected from Table 3, evidence of a subject's likely favorable or poor response to viral therapy can be corroborated by measuring the level of expression of markers from Table 1 and Table 2.

[0176] Any therapeutic virus described herein can be used to assess whether a subject is likely to respond favorably or poorly to viral therapy. In some examples, a subject can be screened with a plurality of viruses designed for viral therapy to determine which virus can be used in viral therapy. For example, where a subject responds poorly to a first therapeutic virus, at least a second virus can be used to determine whether a subject is likely to respond favorably or poorly to viral therapy containing the at least a second virus. In such examples, a biological sample, such as a tumor sample, from the subject is contacted with the at least a second virus and the level of expression of at least one marker is determined. If the level of expression of the at least one marker is indicative of a favorable response, viral therapy can be performed using the at least a second virus.

[0177] In some examples, methods to determine whether a subject is likely to respond to favorably or poorly to viral can include determining the level of expression of at least one marker in a biological sample, such as a tumor sample, not contacted with a therapeutic virus. In such examples, a biological sample, for example, a biopsy (the following is not limited to a biopsy samples only), can be obtained from a subject and the level of expression of at least one marker is determined. In some examples, the at least one marker can be selected from among markers listed in Table 1, Table 2 and Table 3. In some examples, the at least one marker encompasses a plurality of markers selected from among the markers listed in Table 1, Table 2, and Table 3. In some examples, the expression of at least 1, at least 5, at least 10, at least 15, at least 20, or more than 20 markers selected from among the markers listed in Table 1, Table 2 and Table 3 can be determined. In some examples, the expression level of all the markers in Table 1, Table 2, and Table 3 can be determined. In other examples, the at least one marker can be a marker identified by methods described herein.

[0178] In some examples, the amount or pattern of expression of the at least one marker or a plurality of markers in a biological sample, such as a tumor sample, which has not been contacted with a therapeutic virus is assessed to determine whether the amount or pattern resembles the amount or pattern characteristic of biological samples which respond favorably to viral therapy or biological samples which respond poorly to viral therapy. For example, if the amount or pattern resembles the amount or pattern characteristic of biological samples which respond favorably to viral therapy then the subject from which the biological sample was obtained is likely to respond favorably to viral therapy and therapy with the therapeutic virus can be initiated. In another example, if the amount or pattern resembles the amount or pattern characteristic of biological samples which respond poorly to viral therapy then the subject from which the biological sample was obtained is likely to respond poorly to viral therapy and a therapeutic approach other than therapy with the therapeutic virus can be employed.

[0179] In some examples, the amount or pattern of expression of the at least one marker or plurality of markers in the biological sample, such as a tumor sample, can be compared to the amount or pattern of expression which has been previously determined to be characteristic of biological samples which respond favorably or poorly to viral therapy. For example, in some examples, the amount of expression of the at least one marker or plurality of markers can be determined relative to a standard such as the size of the tumor or other biological tissue in the biological sample, the volume of the biological sample, the weight of the biological sample, the amount of total protein in the biological sample, the total amount of nucleic acid in the biological sample, the amount of DNA in the biological sample, the amount of RNA in the biological sample or any other appropriate standard. For example, if a concentration of 50 ng/ml or more of a particular marker per 150 mg of tumor has been shown to be characteristic of tumors which respond favorably to viral therapy and the tumor biopsy obtained from the subject has an expression level of 75 ng/ml per 150 mg of tumor, it is likely that the subject will respond favorably to viral therapy and viral therapy can be initiated. The same type of analysis can be performed using the concentrations of a plurality of markers or by measuring the concentrations of the markers relative to any of the standards described above.

[0180] The pattern of expression of one or more markers in the biological sample, such as a tumor sample, also can be compared to the pattern of expression of one or more markers which has been previously determined to be characteristic of biological samples which respond favorably or poorly to viral therapy. For example, if it has been determined that biological samples which respond favorably to viral therapy exhibit a high level of expression of a first marker, a low level of expression of a second marker, and an intermediate level of expression of a third marker and this same pattern of expression is observed in a biological sample obtained from the subject, the subject is likely to respond favorably to viral therapy and therapy with the therapeutic virus can be initiated. In another example, if it has been determined that biological samples which respond poorly to viral therapy exhibit a low level of expression of a first marker, a low level of expression of a second marker, and a high level of expression of a third marker and this same pattern of expression is observed in a biological sample obtained from the subject, the subject is likely to respond poorly to viral therapy and a therapeutic approach other than therapy with the therapeutic virus can be initiated.

### C. THERAPEUTIC VIRUSES

[0181] Provided herein are viruses designed for viral therapy (i.e. therapeutic viruses). Viruses described in U.S. Patent Publication Nos. 2005/0031643, 2004/0234455 and 2004/0213741, can be used in conjunction with examples. In particular, U.S. Patent Publication Nos. 2005/0031643, 2004/0234455 and 2004/0213741 describe desirable characteristics of viruses designed for viral therapy, such as, attenuated pathogenicity, reduced toxicity, preferential accumulation in certain cells and tissues, such as a tumor, ability to activate an immune response against tumor cells, immunogenicity, replication competence, expression of exogenous proteins, and any combination of the foregoing characteristics.

[0182] In some examples, viruses designed for viral therapy can include recombinant vaccinia viruses. A variety of vaccinia virus strains are available, including Western Reserve (WR), Copenhagen, Tashkent, Tian Tan, Lister, Wyeth, IHD-J, and IHD-W, Brighton, Ankara, MVA, Dairen I, L-IPV, LC16M8, LC16MO, LIVP, WR 65-16, Connaught, New York City Board of Health. In further examples, a vaccinia virus can be a member of the Lister strain. In even further examples, the Lister virus can be an attenuated Lister strain, such as the LIVP (Lister virus from the Institute for Research on Virus Preparations, Moscow, Russia) strain.

[0183] In particular examples, a therapeutic virus can include the GLV-1h68 virus (Zhang et al. (2007) Cancer Research 67:10038-10046). The GLV-1h68 virus is a replication-competent recombinant vaccinia virus that was constructed by inserting three expression cassettes (encoding Renilla luciferase-Aequorea green fluorescent protein fusion, β-galactosidase, and β-glucuronidase) into the F14.5L, J2R (encoding thymidine kinase) and A56R (encoding hemagglutinin) loci of the viral genome, respectively. GLV-1h68 has an enhanced tumor targeting specificity and much reduced toxicity compared with its parental LIVP strains.

[0184] In some examples, a therapeutic virus can be immunogenic where the virus can induce a host immune response against the virus. The immune response can be activated in response to viral antigens or can be activated as a result of viral-infection induced cytokine or chemokine production. In some examples, an immune response against a therapeutic virus can result in killing of a target tissue or target cell. In some examples, the immune response can result in the production of antibodies against tumor antigens. In some examples, an immune response can result in cell killing through a bystander effect, for example, where uninfected cells in close proximity to cells infected by the virus are killed as infected cells are killed.

[0185] In some examples, a therapeutic virus can be an attenuated virus which is replication competent. Such viruses can have a decreased capacity to cause disease in a host and accumulate in targeted tissues or cells. Methods to attenuate a virus can include reducing the replication competence of the virus. For example, in the vaccinia virus one or more genes selected from among the thymidine kinase gene, the hemaglutinin gene and the F14.5L gene can be modified so as to attenuate the virus. In some examples, the modification reduces the ability of the virus to replicate. In some examples, the modification inactivates the protein encoded by the gene or results in a lack of expression of the protein encoded by the gene.

[0186] In some examples, a therapeutic virus can accumulate in any of a variety of organs, tissues or cells of the host. Accumulation can be evenly distributed over the entire host organism, or can be concentrated in one or a few organs or tissues. In certain examples, viruses can accumulate in targeted tissues, such as tumors, metastases, or cancer cells. In exemplary examples, viruses designed for viral therapy can accumulate in a targeted organ, tissue or cell at least about 2-fold greater, at least about 5-fold greater, at least about 10-fold greater, at least about 100-fold greater, at least about 1.000-fold greater, at least about 10.000-fold greater, at least about 100.000-fold greater, or at least about 1,000,000-fold greater, than the accumulation in a non-targeted organ, tissue or cell.

[0187] Methods for the generation of recombinant viruses using recombinant DNA techniques are well known in the art (e.g., see U.S. Pat. Nos. 4,769,330, 4,603,112, 4,722,848, 4,215,051, 5,110,587, 5,174,993, 5,922,576, 6,319,703, 5,719,054, 6,429,001, 6,589,531, 6,573,090, 6,800,288, 7,045,313, He et al. (1998) PNAS 95(5): 2509-2514, Racaniello et al., (1981) Science 214: 916-919, Hruby et al., (1990) Clin Micro Rev. 3:153-170).

[0188] Non-limiting examples of attenuated Lister strain LIVP viruses that can be used in any of the method provided herein or that can be modified to encode proteins provided herein include, LIVP viruses described in U.S. Patent Publication Nos. 2005/0031643, 2004/0234455 and 2004/0213741 and U.S. patent application Ser. No. 11/975,088. Exemplary viruses contained therein that can be modified as described here include viruses which have one or more expression cassettes removed from GLV-1h68 and replaced with a heterologous non-coding DNA molecule (e.g., GLV-1h70, GLV-1h71, GLV-1h72, GLV-1h73, GLV-1h74, GLV-1h85, and GLV-1h86). GLV-1h70 contains (P_{SEL})Ruc-GFP inserted into the F14.5L gene locus, (P_{SEL})rTrfR and (P_{7.5k})LacZ inserted into the TK gene locus, and a non-coding DNA molecule inserted into the HA gene locus in place of (P₁₁ₖ)gusA. GLV-1h71 contains a non-coding DNA molecule inserted into the F14.5L gene locus in place of (P_{SEL})Ruc-GFP, (P_{SEL})rTrfR and (P_{7.5k})LacZ inserted into the TK gene locus, and (P₁₁ₖ)gusA inserted into the HA gene locus. GLV-1h72 contains (P_{SEL})Ruc-GFP inserted into the F14.5L gene locus, a non-coding DNA molecule inserted into the TK gene locus in place of (P_{SEL})rTrfR and (P_{7.5k})LacZ, and P₁₁ₖgusA inserted into the HA gene locus. GLV-1h73 contains a non-coding DNA molecule inserted into the F14.5L gene locus in place of (P_{SEL})Ruc-GFP, (P_{SEL})rTrfR and (P_{7.5k})LacZ inserted into the TK gene locus, and a non-coding DNA molecule inserted into the HA gene locus in place of (P₁₁ₖ)gusA. GLV-1h74 contains a non-coding DNA molecule inserted into the F14.5L gene locus in place of (P_{SEL})Ruc-GFP, a non-coding DNA molecule inserted into the TK gene locus in place of (P_{SEL})rTrfR and (P_{7.5k})LacZ, and a non-coding DNA molecule inserted into the HA gene locus in place of (P₁₁ₖ)gusA. GLV-1h85 contains a non-coding DNA molecule inserted into the F14.5L gene locus in place of (P_{SEL})Ruc-GFP, a non-coding DNA molecule inserted into the TK gene locus in place of (P_{SEL})rTrfR and (P_{7.5k})LacZ, and (P₁₁ₖ)gusA inserted into the HA gene locus. GLV-1h86 contains (P_{SEL})Ruc-GFP inserted into the F14.5L gene locus, a non-coding DNA molecule inserted into the TK gene locus in place of (P_{SEL})rTrfR and (P_{7.5k})LacZ, and a non-coding DNA molecule inserted into the HA gene locus in place of (P₁₁ₖ)gusA. Other exemplary viruses include, but are not limited to, LIVP viruses that express one or more therapeutic gene products, such as angiogenesis inhibitors (e.g., GLV-1h81, which contains DNA encoding the plasminogen K5 domain under the control of the vaccinia synthetic early-late promoter in place of the gusA expression cassette in GLV-1h68; GLV-1h104, GLV-1h105 and GLV-1h106, which contain DNA encoding a truncated human tissue factor fused to the αᵥβ₃-integrin RGD binding motif (tTF-RGD) under the control of a vaccinia synthetic early promoter, vaccinia synthetic early/late promoter or vaccinia synthetic late promoter, respectively, in place of the LacZ/rTFr expression cassette at the TK locus of GLV-1h68; GLV-1h107, GLV-1h108 and GLV-1h109, which contains DNA encoding an anti-VEGF single chain antibody G6 under the control of a vaccinia synthetic early promoter, vaccinia synthetic early/late promoter or vaccinia synthetic late promoter, respectively, in place of the LacZ/rTFr expression cassette at the TK locus of GLV-1h68) and proteins for tumor growth suppression (e.g., GLV-1h90, GLV-1h91 and GLV-1h92, which express a fusion protein containing an IL-6 fused to an IL-6 receptor (sIL-6R/IL-6) under the control of a vaccinia synthetic early promoter, vaccinia synthetic early/late promoter or vaccinia synthetic late promoter, respectively, in place of the gusA expression cassette in GLV-1h68; and GLV-1h96, GLV-1h97 and GLV-1h98, which express IL-24 (melanoma differentiation gene, mda-7) under the control of a vaccinia synthetic early promoter, vaccinia synthetic early/late promoter or vaccinia synthetic late promoter, respectively, in place of the Ruc-GFP fusion gene expression cassette at the F14.5L locus of GLV-1h68). Additional therapeutic gene products that can be engineered in the viruses provided herein also are described elsewhere herein.

[0189] 1. Modifications of Therapeutic Viruses

[0190] In some examples, therapeutic viruses can contain a genetic modification. Such modifications can include truncations, insertions, deletions and mutations to the viral genome. In some examples, modifications can result in a change of viral characteristics, for example, immunogenicity, pathogenicity, toxicity, ability to lyse cells or cause cell death, and ability to preferentially accumulate in particular cells.

[0191] In some examples, a virus can be modified to produce a genetic variant using techniques well known in the art. Such techniques for modifying vaccinia strains by genetic engineering are well established (Moss (1993) Curr. Opin. Genet. Dev. 3:86-90; Broder and Earl (1999) Mol. Biotechnol. 13, 223-245; Timiryasova et al. (2001) Biotechniques 31: 534-540), and described in U.S. patent application Ser. No. 11/238,025. In some examples, genetic variants can be obtained by general methods such as mutagenesis and passage in cell or tissue culture and selection of desired properties, as exemplified for respiratory syncytial virus in Murphy et al. (1994) Virus Res. 32:13-26. In some examples, genetic variants can be obtained by methods in which nucleic acid residues of the virus are added, removed or modified relative to the wild type. Any of a variety of known mutagenic methods can be used, including recombination-based methods, restriction endonuclease-based methods, and PCR-based methods. Mutagenic methods can be directed against particular nucleotide sequences such as genes, or can be random, where selection methods based on desired characteristics can be used to select mutated viruses. Any of a variety of viral modifications can be made, according to the selected virus and the particular known modifications of the selected virus.

[0192] In certain examples, any of a variety of insertions, mutations or deletions of the vaccinia viral genome can be used herein. Such modifications can include insertions, mutations or deletions of: the thymidine kinase (TK) gene, the hemagglutinin (HA) gene, the VGF gene (U.S. Patent Publication No. 20030031681); a hemorrhagic region or an A type inclusion body region (U.S. Pat. No. 6,596,279); Hind III F, F13L, or Hind III M (as taught in U.S. Pat. No. 6,548,068); A33R, A34R, A36R or B5R genes (Katz et al., J. Virology 77:12266-12275 (2003); SalF7L (Moore et al., EMBO J. 1992 11:1973-1980); N1L (Kotwal et al., Virology 1989 171:579-587); M1 lambda (Child et al., Virology. 1990 174:625-629); HR, HindIII-MK, HindIII-MKF, HindIII-CNM, RR, or BaniF (Lee et al., J. Virol. 1992 66:2617-2630); C21L (Isaacs et al., Proc Natl Acad Sci USA. 1992 89:628-632); or F3 (F14.5L) (U.S. patent application Ser. No. 11/238,025).

[0193] 2. Viruses Encoding a Marker Protein that is Increased in Cells that Respond Favorable to Tumor Therapy

[0194] Some examples relate to viruses designed for gene therapy which encode a marker protein whose level of expression is increased in cells which respond favorably to viral therapy. Other examples relate to viruses designed for gene therapy which encode an agent which reduces the level of expression of a marker protein whose level of expression is decreased in cells which respond favorably to viral therapy. Each of the foregoing viruses can, in some examples, be a modified virus such as those described above.

[0195] In some examples, a therapeutic virus can contain a heterologous nucleic acid encoding a protein whose levels are increased in cells that respond favorably to viral therapy. In certain examples, the heterologous nucleic acid is operatively linked to regulatory elements. Such regulatory elements can include promoters, enhancers, or terminator sequences. Promoter sequences can be constitutive or inducible. Methods to increase the level of expression of a particular protein can include providing a therapeutic virus expressing the particular protein to a cell.

[0196] The methods can include providing a therapeutic virus expressing a transactivator to a cell, where the transactivator can increase the level of expression of a particular endogenous protein in the cell. In such examples, the endogenous protein can be a protein whose level of expression is increased in cells that respond favorably to viral therapy.

[0197] In some examples, the increase in the level of expression of a particular protein in a cell contacted with a therapeutic virus containing a therapeutic agent compared with a cell not contacted with the virus can be about less than 2-fold, about 2-fold, about 3-fold, about 4-fold, about 5-fold, about 6-fold, about 7-fold, about 8-fold, about 9-fold, about 10-fold, about 20-fold, about 30-fold, about 40-fold, about 50-fold, about 60-fold, about 70-fold, about 80-fold, about 90-fold, about 100-fold or greater than about 100-fold.

[0198] In some examples, the virus can encode one or more proteins whose level of expression is increased in cells that respond favorably to viral therapy. Such proteins can include, but are not limited to, the proteins listed in Table 1. In some examples, the virus can encode one or more proteins selected from among IL-18 (Interleukin-18), MCP-5 (Monocyte Chemoattractant Protein-5; CCL12), IL-11 (Interleukin-11), MCP-1 (Monocyte Chemoattractant Protein-1), MPO (Myeloperoxidase), Apo A1 (Apolipoprotein A1), TIMP-1 (Tissue Inhibitor of Metalloproteinase Type-1), CRP (C Reactive Protein), Fibrinogen, MMP-9 (Matrix Metalloproteinase-9), Eotaxin (CCL11), GCP-2 (Granulocyte Chemotactic Protein-2, CXCL6) IL-6 (Interleukin-6), Tissue Factor (TF), SAP (Serum Amyloid P), FGF-basic (Fibroblast Growth Factor-basic), MCP-3 (Monocyte Chemoattractant Protein-3, CCL7), IP-10 (CXCL), MIP-2, and Thrombopoetin.

[0199] Among the viruses provided herein are viruses encoding cytokines, such as chemokines, including members of the C—X—C and C—C chemokine families. The chemokine-encoding viruses include, but are not limited to, viruses encoding IP-10 (e.g. mouse IP-10 having the sequence of amino acids set forth in SEQ ID NO: 24, and human IP-10 having the sequence of amino acids set forth in SEQ ID NO: 485), MCP-1 (e.g. mouse MCP-1 having the sequence of amino acids set forth in SEQ ID NO: 50, and human MCP-1, having the sequence of amino acids set forth in SEQ ID NO: 135); RANTES (see SEQ ID NO: 142 (human); SEQ ID NO: 57 (mouse); MIP1-alpha (see SEQ ID NO: 130 (human); SEQ ID NO: 44 (mouse)); eotaxin (see SEQ ID NO: 88 (human); SEQ ID NO: 10 (mouse)); and MIP1-beta (see SEQ ID NO: 131 (human); SEQ ID NO: 45 (mouse)). These viruses can be used in treatment of subjects, such as human patients. For example, the viruses can be formulated and administered to a subject for treating tumors, e.g. by promoting anti-tumor immunity, preventing angiogenesis, preventing tumor growth, and other anti-tumor activities. A plurality of immunostimulatory cytokines promote anti-cancer immune responses and/or inhibit growth of tumors, for example, by preventing angiogenesis (reviewed in Oppenhiem et al., Clin. Cancer Res. 3, 2682-2686 (1997)).

[0200] a. IP-10 Encoding Viruses

[0201] Among the provided viruses are viruses encoding interferon-gamma-induced protein (IP-10; also known as Chemokine (C—X—C motif) ligand 10 (CXCL10), 10 kDa interferon-gamma-induced protein, C7, crg-2, Gamma-IP10 (γ-IP10), gIP-10, IFI10, INP10, mob-1, SCYB10, and Small inducible cytokine B10 precursor), including viruses encoding mouse IP-10 (mIP-10, such as mIP-10 having the sequence of amino acids set forth in SEQ ID NO: 24 and mIP-10 encoded by the sequence of nucleic acids set forth in SEQ ID NO: 397) and viruses encoding human IP-10 (such as IP-10 having the sequence of amino acids set forth in SEQ ID NO: 485, and IP-10 encoded by the sequence of nucleic acids set forth in SEQ ID NO: 484). Exemplary IP-10 encoding viruses are described in Example 21, below. IP-10, a member of the C—X—C chemokine family, is a small cytokine (10 kDa) secreted by monocytes, endothelial cells, fibroblasts and other cells in response to IFN-γ production. IP-10 binds to chemokine receptor CXCR3, acting as chemoattractant for a plurality of immune cells, including macrophages, monocytes, T cells, NK cells, and dendritic cells, and promoting cell adhesion (Luster et al., Nature 315: 672-676 (1985); Dufour et al., J. Immunol. 168: 3195-3204 (2002).

[0202] The IP-10 encoding viruses can be used in treatment of subjects, such as human patients. For example, the viruses can be administered to a subject for treating tumors, e.g., by promoting anti-tumor immunity, and/or blocking tumor cell proliferation, tumor growth and angiogenesis. C—X—C chemokines, including IP-10, have been shown to have anti-tumor activities, including suppression of tumor growth and angiogenesis and promotion of anti-tumor immunity (Angiolillo et al., J. Exp. Med. 182 155-162 (1995); Oppenhiem et al., Clin. Cancer Res. 3, 2682-2686 (1997)). For example, IP-10 reportedly inhibited bone marrow colony formation and angiogenesis; transfection of IP-10 into murine tumor cells promoted anti-tumor immunity (Luster et al., J. Exp. Med. 178, 1057-1065 (2003)).

[0203] b. MCP-1 Encoding Viruses

[0204] Also among the viruses provided herein are viruses encoding monocyte chemoattractant protein-1 (MCP-1, also known as chemokine (C—C motif) ligand 2 (CCL2)), including mouse MCP-1 (such as MCP-1 having the amino acid sequence set forth in SEQ ID NO: 50) and human MCP-1 (hMCP-1, such as hMCP-1 having the sequence of amino acids set forth in SEQ ID NO: 135 and hMCP-1 encoded by the sequence of nucleic acids set forth in SEQ ID NO: 483). Exemplary MCP-1 encoding viruses are described in Example 21, below. MCP-1 is generated in vivo from a protein precursor by cleavage of a 23 amino acid signal peptide, to yield the mature MCP-1 protein, which is 76 amino acids in length, and approximately 13 kilodaltons (kDa). MCP-1 is a C—C family chemokine that recruits monocytes, memory T cells and dendritic cells and binds to receptors including CCL2, CCR2 and CCR4 (Gu et al., J. Leuk. Biol. 62: 577-580 (1997); Carr et al., Proc. Natl. Acad. Sci. USA 91: 3652-3656 (1994).

[0205] The MCP-1-encoding viruses can be used in treatment of subjects, such as human patients. For example, the viruses can be administered to a subject for treating tumors, e.g. by promoting anti-tumor immunity, and/or blocking tumor cell proliferation and tumor growth. Anti-tumor effects of MCP-1 have been observed in a plurality of cancers, including colon carcinoma and renal adenocarcinoma; MCP-1 expression positively correlated with patient survival rate and immune cell infiltration and inversely correlated with tumor proliferation in pancreatic cancer (reviewed in Craig et al., Cancer Metastasis Rev 25:611-619 (2006)). MCP-1 can promote migration of monocytes/macrophages to tumors and was observed to promote monocyte-mediated inhibition of tumor growth in vitro (Matushima et al., J. Exp. Med. 169: 1485-1490 (1987). MCP-1 expression in tumor cells blocked in vivo tumor formation in nude mice (Rollins and Sunday, Mol. Cell. Biol. 11 (6), 3125-3131 (1991). Other reports indicate that MCP-1 can attract tumor cells and promote tumor metastasis, e.g. bone metastasis, in some cancers (Oppenhiem et al., Clin. Cancer Res. 3, 2682-2686 (1997); see also Pellegrino et al., Recent Prog. Med. 93(11): 642-654 (2002); Craig et al., Cancer Metastasis Rev 25:611-619 (2006).

[0206] c. TIMP-1, 2, 3 Encoding Viruses

[0207] In some examples, the virus can encode TIMP-1. TIMP-1 has been identified herein as having an increased expression level in cells which permit a good level of replication of a therapeutic virus or which respond favorably to viral therapy. TIMP-1 is a multifunctional protein that plays contrasting roles during angiogenesis and metastasis. In some studies TIMP-1 has been reported to regulate matrix metalloproteinase activity, act as a growth stimulator and inhibit apoptosis. For example, Yamazaki et al. have shown that transgenic mice carrying a transgene of TIMP-1 linked to the albumin promoter (Alb) have a greatly decreased tumor incidence (Yamazaki M et al. (2004) 25(9): 1735-46). In particular, in an initial mammary carcinogenesis study, heterozygous Alb-TIMP-1 mice had a 25% tumor incidence compared to wild-type littermates with a 83.3% tumor incidence. Further analysis of the tumors in the Alb-TIMP-1 mice showed evidence of decreased proliferative activity and inhibition of apoptosis. In another study, C57BL/6j-CBA mice overexpressing human TIMP-1 in the liver under the control of the mouse albumin promoter/enhancer were shown to have an increased tumor angiogenic response (de Lorenzo M S et al. (2003) 17(1):45-50). In addition to the increased tumor angiogenic response, transgenic animals also showed an early subcutaneous growth advantage compared to wild-type hybrid mice. de Lorenzo et al. postulated that TIMP-1 displays paradoxical effects on tumor progression and that circulating TIMP-1 can be efficient in suppressing lung colonization of melanoma cells.

[0208] In some examples, the virus can encode TIMP-2. TIMP-2 can inhibit the invasive activities of matrix metalloproteinases in malignant tumors, such as malignant gliomas. In one study, a gene encoding TIMP-2 was transferred in vitro to malignant glioma cells using a defective herpes simplex virus (HSV) (Hoshi M, et al., Antitumoral effects of defective herpes simplex virus-mediated transfer of tissue inhibitor of metalloproteinases-2 gene in malignant glioma U87 in vitro: consequences for anti-cancer gene therapy. Cancer Gene Ther. 2000 7(5):799-805). The defective HSV vector, dvSRaTIMP2, was engineered to express human TIMP-2 using a replication-competent temperature-sensitive HSV-tsK mutant. U87 human glioblastoma cells infected with the vector in vitro showed an inhibition of invasive activity.

[0209] In some examples, the virus can encode TIMP-3. In experiments where neuroblastoma and malignant peripheral nerve sheath (MPNS) tumor xenografts were infected with an oncolytic virus expressing human TIMP-3, an enhancement of antitumor efficacy has been observed (Mahller Y Y, et al (2008) Cancer Res. 68(4):1170-9). The antitumor efficacy of oncolytic herpes simplex viruses (OHSV) expressing either human TIMP-3, or luciferase was evaluated in infected neuroblastoma and malignant peripheral nerve sheath tumor (MPNST) xenografts. Cells infected with the virus expressing TIMP-3 showed increased cytotoxicity and reduced metalloproteinase activity. Tumors treated with the virus expressing TIMP-3 showed delayed tumor growth, increased peak levels of infectious virus, immature collagen extracellular matrix, and reduced tumor vascular density. In addition, treatment with the virus expressing TIMP-3 reduced circulating endothelial progenitors.

[0210] 3. Viruses an Agent which Reduces the Level of Expression of a Marker Protein

[0211] In other examples, a therapeutic virus can contain a heterologous nucleic acid encoding an agent which reduces the level of expression of a marker whose level of expression is decreased in cells which respond favorably to viral therapy or in cells which permit a good level of replication of a therapeutic virus. Methods to decrease the level of expression of a protein can include providing a therapeutic virus to a cell, where the virus can express a protein that inhibits the expression of the marker.

[0212] In some examples, the level of expression of a marker protein in a cell can be decreased by providing a therapeutic virus encoding a nucleic acid that reduces the level of expression of a marker whose level of expression is decreased in cells that respond favorably to viral therapy. In such methods the therapeutic agent can include an antisense nucleic acid targeted against a nucleic acid encoding the marker, small inhibitory RNA (siRNA) targeted against a nucleic acid encoding the marker, or a ribozyme targeted against a nucleic acid encoding the marker.

[0213] Methods to decrease the level of expression of a marker protein using antisense nucleic acids are well known in the art. Antisense sequences can be designed to bind to the promoter and other control regions, exons, introns or even exon-intron boundaries of a gene. Antisense RNA constructs, or DNA encoding such antisense RNAs, can be employed to inhibit gene transcription or translation or both within a host cell, either in vitro or in vivo, such as within a host animal, including a human subject. While all or part of the gene sequence can be employed in the context of antisense construction, statistically, any sequence 17 bases long should occur only once in the human genome and, therefore, suffice to specify a unique target sequence.

[0214] Methods to decrease the level of expression of a marker protein using siRNA are well known in the art. For example, the design of a siRNA can be readily determined according to the mRNA sequence encoding of a particular protein. Some methods of siRNA design and downregulation are further detailed in U.S. Patent Application Publication No. 20030198627.

[0215] Methods to decrease the level of expression of a particular protein using a ribozyme are well known in the art. Several forms of naturally-occurring and synthetic ribozymes are known, including Group I and Group II introns, RNaseP, hairpin ribozymes and hammerhead ribozymes (Lewin A S and Hauswirth W W, Trends in Molecular Medicine 7: 221-228, 2001). In some examples, ribozymes can be designed as described in int. PCT Patent Application Publication No. WO 93/23569 and PCT Patent Application Publication No. WO 94/02595. U.S. Pat. No. 7,342,111 describes general methods for constructing vectors encoding ribozymes.

[0216] In some examples, the decrease in the level of expression of a marker protein in a cell contacted with a therapeutic virus encoding an agent which decreases the level of expression of the marker compared with a cell not contacted with the virus can be about less than 2-fold, about 2-fold, about 3-fold, about 4-fold, about 5-fold, about 6-fold, about 7-fold, about 8-fold, about 9-fold, about 10-fold, about 20-fold, about 30-fold, about 40-fold, about 50-fold, about 60-fold, about 70-fold, about 80-fold, about 90-fold, about 100-fold or greater than about 100-fold. In some examples, the level of expression of a marker protein in a cell contacted with a therapeutic virus containing a nucleic acid encoding an agent which decreases the level of expression of the marker protein can be zero.

[0217] In some examples, the agent can decrease the level of expression of one or more proteins whose level of expression is known to be decreased in cells that respond favorably to viral therapy. In some examples, the agent can be directed to one or more of the proteins listed in Table 2. In other examples, the virus can encode an agent which decreases the level of expression of one or more proteins selected from among MIP-1 beta (Macrophage Inflammatory Protein-1beta), MDC (Macrophage-Derived Chemokine, CCL22), MIP-1alpha (Macrophage Inflammatory Protein-1alpha, CCL3), KC/GROalpha (Melanoma Growth Stimulatory Activity Protein), VEGF (Vascular Endothelial Cell Growth Factor), Endothelin-1, MIP-3beta (Macrophage Inflammatory Protein-3beta, also know as Exodus-3 or ELC), RANTES (Regulation Upon Activation, Normal T-Cell Expressed and Secreted, CCL5), IL-5 (Interleukin-5), IL-1alpha (Interleukin-1alpha), EGF (Epidermal Growth Factor), Lymphotactin (XCL1), GM-CSF (Granulocyte Macrophage-Colony Stimulating Factor), MIP-1 gamma (Macrophage Inflammatory Protein-1 gamma, CCL4) and IL-1beta (Interleukin-1beta).

[0218] In some examples, the virus can encode an agent which alters the expression of a protein whose expression is altered in cells that respond poorly to viral therapy. For example, in some examples the virus can encode an agent which increases the level of expression of a marker for which the level of expression is decreased in cells which respond poorly to viral therapy. Alternatively, the virus can encode a marker protein whose expression is decreased in cells that respond poorly to viral therapy, thereby increasing the level of expression of the marker protein. In other examples, the virus can encode an agent which decreases the level of expression of a marker whose level of expression is increased in cells which respond poorly to viral therapy.

[0219] In some examples, the virus contain a regulatory sequence operatively linked to a nucleic acid sequence encoding a marker whose level of expression is increased in cells which respond favorably to viral therapy or cells which permit good viral replication. In other examples, the virus contains a regulatory sequence operatively linked to a nucleic acid encoding an agent which reduces the level of expression of a marker whose level of expression is decreased in cells which respond favorably to viral therapy or cells which permit good viral replication. In still further examples, the virus contains a regulatory sequence operably linked to a nucleic acid encoding a protein whose level of expression is decreased in cells which respond poorly to viral therapy or cells which permit poor viral replication. In other examples, the virus contains a regulatory sequence operatively linked to a nucleic acid encoding an agent which decreases the level of expression of a marker whose level of expression is increased in cells which respond poorly to viral therapy or cells which permit poor viral replication. Regulatory sequences can include a constitutive promoter, an inducible promoter, or an enhancer. In such examples, a regulatory sequence can include a natural or synthetic vaccinia virus promoter. In another embodiment, the regulatory sequence can contain a poxvirus promoter. In some examples, strong late promoters can be used to achieve high levels of expression of the foreign genes. Early and intermediate-stage promoters, however, can also be used. In one embodiment, the promoters contain early and late promoter elements, for example, the vaccinia virus early/late promoter p7.5, vaccinia late promoter p11, a synthetic early/late vaccinia pE/L promoter (Patel et al. (1988) Proc. Natl. Acad. Sci. USA 85, 9431-9435); Davison and Moss (1989) J Mol Biol 210, 749-769; Davison et al., (1990), Nucleic Acids Res. 18, 4285-4286; Chakrabarti et al. (1997) BioTechniques 23, 1094-1097. In exemplary examples, an inducible promoter system can include a chimeric transcription factor containing a progesterone receptor fused to the yeast GAL4 DNA-binding domain and to the activation domain of the herpes simplex virus protein VP16, and a synthetic promoter containing a series of GAL4 recognition sequences upstream of the adenovirus major late E1B TATA box, linked to one or more exogenous genes. In such a system, administration of RU486 to a subject can result in induction of the therapeutic agent.

### D. HOST CELLS

[0220] Provided herein are host cells that contain a therapeutic virus. Such host cells can include any of a variety of mammalian, avian and insect cells and tissues that are susceptible to viruses. Examples of cells can include, for example, but not limited to, PANC-1 (pancreatic carcinoma), MIA PaCa-2 (pancreatic carcinoma), GI-101A (breast cancer), SiHa (cervical cancer), NCI-H1299 (lung carcinoma), HT-29 (colon adenocarcinoma), HeLa (cervical cancer), CCRF-CEM (leukemia), HL-60 (leukemia), P388 (leukemia), P388/ADR (leukemia), KG1a (leukemia), THP-1 (leukemia), K-562 (leukemia), MOLT-4 (leukemia), RPMI-8226 (leukemia), SR (leukemia), A549 (ATCC) (non-small cell lung cancer), EKVX (non-small cell lung cancer), HOP-62 (non-small cell lung cancer), HOP-92 (non-small cell lung cancer), NCI-H226 (non-small cell lung cancer), NCI-H23 (non-small cell lung cancer), NCI-H322M (non-small cell lung cancer), NCI-H460 (non-small cell lung cancer), NCI-H522 (non-small cell lung cancer), LXFL 529 (non-small cell lung cancer), DMS114 (small cell lung cancer), SHP-77 (small cell lung cancer), COLO 205 (colon cancer), HCC-2998 (colon cancer), HCT-116 (colon cancer), HCT-15 (colon cancer), KM12 (colon cancer), SW-620 (colon cancer), DLD-1 (colon cancer), KM20L2 (colon cancer), SF-268 (central nervous system), SNB-78 (central nervous system), XF 498 (central nervous system), SF-295 (central nervous system), SF-539 (central nervous system), SNB-19 (central nervous system), SNB-75 (central nervous system), U251 (central nervous system), LOX IMVI (melanoma), RPMI-7951 (melanoma), M19-MEL (melanoma), MALME-3M (melanoma), M14 (melanoma), SK-MEL-2 (melanoma), SK-MEL-28 (melanoma), SK-MEL-5 (melanoma), UACC-257 (melanoma), UACC-62 (melanoma), IGR-OV1 (ovarian cancer), OVCAR-3 (ovarian cancer), OVCAR-4 (ovarian cancer), OVCAR-5 (ovarian cancer), OVCAR-8 (ovarian cancer), SK-OV-3 (ovarian cancer), 786-0 (renal cancer), A498 (renal cancer), RXF-631 (renal cancer), SN12K1 (renal cancer), ACHN (renal cancer), CAKI-1 (renal cancer), RXF 393 (renal cancer), SN12C (renal cancer), TK-10 (renal cancer), UO-31 (renal cancer), PC-3 (prostate cancer), DU-145 (prostate cancer), MCF7 (breast cancer), MDA-MB-468 (breast cancer), NCI/ADR-RES (breast cancer), MDA-MB-231 (ATCC) (breast cancer), MDA-N (breast cancer), BT-549 (breast cancer), T-47D (breast cancer), HS 578T (breast cancer), and MDA-MB-435 (breast cancer). Additional examples of tumor cells can be found in the art and are publicly available, such as for example the National Cancer Institute Repository of Cancer cell lines. Methods of transforming these host cells and selecting for transformants are well known in the art.

[0221] The tumor cells can be from solid tumors or hematopoietic neoplasms, and from any cell lineage. For example, the tumor cells can be of epithelial origin (carcinomas), arise in the connective tissue (sarcomas), or arise from specialized cells such as melanocytes (melanomas), lymphoid cells (lymphomas), myeloid cells (myelomas), brain cells (gliomas), mesothelial cells (mesotheliomas) or any other cell type. Furthermore, the neoplastic cells can be derived from primary tumors or metastatic tumors.

[0222] 1. Harvesting Tumor Cells from Patient

[0223] In some examples, where primary tumor cells are assayed in the methods provided herein, the initial step in the assay involves isolation of tumor cells from a subject, such as a patient that has cancer. This can be performed before, during, or after the patient has undergone one or more rounds of radiation and/or chemotherapy treatment. When the tumor is a solid tumor, isolation of tumor cells is typically achieved by surgical biopsy. When the cancer is a hematopoietic neoplasm, tumor cells can be harvested by methods including, but not limited to, bone marrow biopsy, needle biopsy, such as of the spleen or lymph nodes, and blood sampling. Biopsy techniques that can be used to harvest tumor cells from a patient include, but are not limited to, needle biopsy, aspiration biopsy, endoscopic biopsy, incisional biopsy, excisional biopsy, punch biopsy, shave biopsy, skin biopsy, bone marrow biopsy, and the Loop Electrosurgical Excision Procedure (LEEP). Typically, a non-necrotic, sterile biopsy or specimen is obtained that is greater than 100 mg, but which can be smaller, such as less than 100 mg, 50 mg or less, 10 mg or less or 5 mg or less; or larger, such as more than 100 mg, 200 mg or more, or 500 mg or more, 1 gm or more, 2 gm or more, 3 gm or more, 4 gm or more or 5 gm or more. The sample size to be extracted for the assay can depend on a number of factors including, but not limited to, the number of assays to be performed, the health of the tissue sample, the type of cancer, and the condition of the patient. The tumor tissue is placed in a sterile vessel, such as a sterile tube or culture plate, and can be optionally immersed in an appropriate media. Typically, the tumor cells are dissociated into cell suspensions by mechanical means and/or enzymatic treatment as is well known in the art. In some examples, the cells from a tumor tissue sample can be subjected to a method to enrich for the tumor cells, such as by cell sorting (e.g. fluorescence activated cell sorting (FACS)).

[0224] Once harvested, the tumor cells can be used immediately, or can be stored under appropriate conditions, such as in a cryoprotectant at −196° C. In some examples, the cells are maintained or grown in appropriate media under the appropriate conditions (e.g., 37° C. in 5% CO₂) to facilitate attachment of the cells to the surface of the culture plate and, in some instances, formation of a monolayer. Any media useful in culturing cells can be used, and media and growth conditions are well known in the art (see e.g., U.S. Pat. Nos. 4,423,145, 5,605,822, and 6,261,795, and Culture of Human Tumor Cells (2004) Eds. Pfragner and Freshney). In some examples, the culture methods used are designed to inhibit the growth of non-tumor cells, such as fibroblasts. For example, the tumor cells can be maintained in culture as multicellular particulates until a monolayer is established (U.S. Pat. No. 7,112,415), or the cells can be cultured in plates containing two layers of different percentage agar (U.S. Pat. No. 6,261,705). The tumor cells can be grown to the desired level, such as for example, a confluent monolayer, or a monolayer displaying a certain percentage confluency, such as 30% or more, 40% or more, 50% or more, 60% or more, 70% or more, 80% or more, or 90% or more. In some examples, the cells are incubated for a short period of time, long enough to facilitate attachment to the culture plate, dish or flask. In still further examples, the cells are added to the culture dish in appropriate media and, optionally, either allowed to settle to the bottom of the culture dish by gravity, or forced to the bottom by, for example, centrifugation, and the assay is then continued without any substantial incubation or growth. Other examples can use cells in suspension.

### E. PHARMACEUTICAL COMPOSITIONS

[0225] Provided herein are pharmaceutical compositions that contain a therapeutic virus and a suitable pharmaceutical carrier. The virus can be any of the viruses described herein. The pharmaceutical compositions can contain an additional therapeutic agent, such as an anticancer agent. Exemplary anticancer agents are provided elsewhere herein.

[0226] Examples of suitable pharmaceutical carriers are known in the art and include phosphate buffered saline solutions, water, emulsions, such as oil/water emulsions, various types of wetting agents, sterile solutions. Such carriers can be formulated by conventional methods and can be administered to the subject at a suitable dose. Colloidal dispersion systems that can be used for delivery of viruses include macromolecule complexes, nanocapsules, microspheres, beads and lipid-based systems including oil-in-water emulsions (mixed), micelles, liposomes and lipoplexes. An exemplary colloidal system is a liposome. Organ-specific or cell-specific liposomes can be used in order to achieve delivery only to the desired tissue. The targeting of liposomes can be carried out by the person skilled in the art by applying commonly known methods. This targeting includes passive targeting (utilizing the natural tendency of the liposomes to distribute to cells of the RES in organs which contain sinusoidal capillaries) or active targeting (for example by coupling the liposome to a specific ligand, for example, an antibody, a receptor, sugar, glycolipid, protein etc., by well known methods). In the present methods, monoclonal antibodies can be used to target liposomes to specific tissues, for example, tumor tissue, via specific cell-surface ligands.

[0227] In some examples, the pharmaceutical composition can contain a therapeutic agent that increases the level of expression of a protein whose level of expression is increased in cells that respond favorably to viral therapy. In other examples, the pharmaceutical compound can contain a therapeutic agent that decreases the level of expression of a protein whose level of expression is decreased in cells that respond favorably to viral therapy. Such therapeutic agents can include proteins and/or nucleic acids. In certain examples, the therapeutic agent can include a chemical compound, a protein, a nucleic acid encoding a protein, a nucleic acid encoding an antisense nucleic acid, a nucleic acid encoding a siRNA, or a nucleic acid encoding a ribozyme.

[0228] In some examples, antisense nucleic acids described herein can be synthesized so as to increase their stability under in vivo conditions. Such antisense nucleic acids typically include one or more chemical modifications to the nucleic acid backbone, bases and/or sugar moieties. For example, such nucleic acids are those in having internucleotide phosphate residues with methylphosphonates, phosphorothioates, phosphoramidates, and phosphate esters. Nonphosphate internucleotide analogs such as siloxane bridges, carbonate brides, thioester bridges, as well as many others known in the art can also be used in modified nucleic acids.

[0229] Modified nucleic acids also can contain α-anomeric nucleotide units and modified nucleotides such as 1,2-dideoxy-d-ribofuranose, 1,2-dideoxy-1-phenylribofuranose, and N⁴, N⁴-ethano-5-methyl-cytosine are contemplated for use in the methods and compositions herein. Modified nucleic acids can also be peptide nucleic acids in which the entire deoxyribose-phosphate backbone has been exchanged with a chemically completely different, but structurally homologous, polyamide (peptide) backbone containing 2-aminoethyl glycine units.

[0230] In certain examples, one can employ antisense constructs which include other elements, for example, those which include C-5 propyne pyrimidines. Oligonucleotides which contain C-5 propyne analogues of uridine and cytidine have been shown to bind RNA with high affinity and to be potent antisense inhibitors of gene expression.

[0231] In other examples, siRNA and ribozymes can be used and applied in much the same way as described for antisense nucleic acids.

### F. METHODS OF ADMINISTERING VIRAL THERAPY

[0232] Also provided herein are methods and compositions that relate to administering viral therapy to a subject. Such therapeutic methods can include one or more steps.

[0233] In some examples, administering viral therapy can include administering a pharmaceutical composition containing a therapeutic virus to a subject. The virus can be any of the viruses described herein. Pharmaceutical compositions include those described herein. Routes of administering viral therapy can include parenteral, e.g., intravenous, intradermal, subcutaneous, oral (e.g., inhalation), transdermal (topical), transmucosal, and rectal administration.

[0234] In some examples, administering viral therapy can include administering more than one therapeutic virus to a subject. In such examples, each virus can have synergistic features for viral therapy. For example, a first therapeutic virus can be co-administered with a second virus encoding a therapeutic agent.

[0235] In some examples, administering viral therapy can include co-administering a therapeutic virus with a therapeutic agent to the subject. Therapeutic agents can include chemical compounds, proteins and/or nucleic acids. In certain examples, the therapeutic agent can include a protein, a nucleic acid encoding a protein, a nucleic acid encoding an antisense nucleic acid, a nucleic acid encoding a siRNA, or a nucleic acid encoding a ribozyme. Therapeutic agents can be co-administered to a subject at the same time as a therapeutic virus, or at a different time. Therapeutic agents can be administered as pharmaceutical compositions according to the methods provided herein. Exemplary therapeutic agents are provided elsewhere herein.

[0236] 1. Monitoring the Progress of Viral Therapy

[0237] Provided herein are methods of monitoring the progress of viral therapy in a subject. Such methods of monitoring can include determining whether the expression of at least one marker is altered in a biological sample, such as a tumor sample, from the subject obtained at a plurality of time points.

[0238] In some examples, methods to monitor the progress of viral therapy can include one or more steps. For example, the method can include obtaining a biological sample, such as a biopsy of a tumor, from a subject; measuring the level of expression of at least one marker in a first biological sample at a first time point; obtaining a second biological sample from a subject; measuring the level of expression in the same at least one marker in the second biological sample at a second time point; and determining whether the level of expression of the at least one marker has increased, decreased or remained substantially the same during the interval between the first and second time points.

[0239] In some examples, the level of expression of at least one marker can be measured in a first biological sample, such as a tumor sample, at a first time point. The first time point can be before viral therapy is administered, at the time viral therapy is administered, or during viral therapy. In further examples, the level of expression of at least one marker can be measured in the second biological sample, such as a second tumor sample, at least a second time point. The time between the first time point and the at least second time point can be about 30 minutes, about 1 hour, about 6 hours about 12 hours, about 1 day, about 2 days, about 3 days, about 4 days, about 5 days, about 6 days, about 7 days, about 8 days, about 9 days, about 10 days, about 11 days, about 12 days, about 13 days, about 14 days, about 2 weeks, about 3 weeks, about 4 weeks, and about 1 month.

[0240] In certain examples, the first biological sample can be obtained from the same anatomical site as the second biological sample.

[0241] In some examples, the marker can be a protein whose level of expression is increased in cells that respond favorably to viral therapy, a protein whose level of expression is decreased in cells that respond favorably to viral therapy, or a protein whose level of expression is substantially the same in cells that respond favorably to viral therapy.

[0242] In some examples, the at least one marker can be selected from among the markers listed in Table 1, Table 2 and Table 3. In some examples, the at least one marker encompasses a plurality of markers selected from among the markers listed in Table 1, Table 2, and Table 3. In some examples, the expression of at least 1, at least 5, at least 10, at least 15, or at least 20 markers can be selected from among the markers listed in Table 1, Table 2 and Table 3 can be determined. In some examples, the expression level of all the markers in Table 1, Table 2, and Table 3 can be determined. In other examples, the at least one marker can be a marker identified by methods described herein.

[0243] In some examples, the marker can be a host protein whose level of expression is increased a tumor that is responding favorably to viral therapy, a host protein whose level of expression is decreased in cells that respond favorably to viral therapy, or a host protein whose level of expression is substantially the same in cells that respond favorably to viral therapy. Such proteins are produced by the host (not the tumor cells themselves), but are found within a tumor tissue sample.

[0244] In some examples, measuring the level of expression of at least one marker can be carried out using methods well known in the art. For protein levels, examples of methods can include, but are not limited to microarray analysis, ELISA assays, Western blotting, or any other technique for the quantitation of specific proteins. For RNA levels, examples of techniques include microarray analysis, quantitative PCR, Northern hybridization, or any other technique for the quantitation of specific nucleic acids.

[0245] In some examples, the step of determining whether the level expression of the at least one selected marker in a first biological sample, such as a tumor sample, contacted with a therapeutic virus has decreased, increased, or remained substantially the same, as compared to the expression of the same at least one selected marker in a second biological sample, such as a second tumor sample, can be performed by comparing quantitative or semi-quantitative results obtained from the measuring step. In some examples, the difference in expression of the same selected marker between the first biological sample and the second biological sample can be about less than 2-fold, about 2-fold, about 3-fold, about 4-fold, about 5-fold, about 6-fold, about 7-fold, about 8-fold, about 9-fold, about 10-fold, about 20-fold, about 30-fold, about 40-fold, about 50-fold, about 60-fold, about 70-fold, about 80-fold, about 90-fold, about 100-fold or greater than about 100-fold.

[0246] In those examples where the at least one marker is selected from Table 1, an increase in expression of the selected marker in second biological sample as compared to expression of the same marker in a first biological sample can indicate that the subject is responding favorably to viral therapy. Conversely, no increase can indicate that the subject is responding poorly to viral therapy. In those examples where the at least one marker is selected from Table 2, a decrease in expression of the selected marker in a second biological sample as compared to expression of the same marker in a first biological sample can indicate that the subject is responding favorably to viral therapy. Conversely, no decrease in expression of the selected marker can indicate that the subject is responding poorly to viral therapy. In those examples where the at least one marker is selected from Table 3, no substantial change in the level of expression of the selected marker in a second biological sample as compared to expression of the same marker in a first biological sample can indicate that the subject is responding favorably to viral therapy. In such examples, evidence of a subject's favorable or poor response to viral therapy can be corroborated by measuring the level of expression of markers from Table 1 and Table 2, respectively.

[0247] In some examples, a subject's response to viral therapy can be used to determine whether viral therapy is effective and as a basis for further therapeutic decisions, for example, whether to modify viral therapy, to continue viral therapy, or to administer alternative therapy.

[0248] In examples where the subject responds poorly to viral therapy containing a first therapeutic virus, the subject can be re-assessed to determine whether it is likely to respond favorable or poorly to a second therapeutic virus using the methods described herein.

### G. IDENTIFYING MARKERS ASSOCIATED WITH A RESPONSE TO VIRAL THERAPY

[0249] Provided herein are methods of identifying markers associated with a favorable or poor response to viral therapy. Such methods can include determining whether the level of expression of a candidate marker is altered by contact with a therapeutic virus in a cell in which a therapeutic virus replicates well or poorly.

[0250] In some examples, methods to identify a marker associated with a subject's response to viral therapy can include one or more steps. Such steps can include comparing the level of expression of a candidate marker in a cell contacted with the virus to the level of expression of the candidate marker in a cell which has not been contacted with the virus.

[0251] In some examples, a single biological sample is obtained and divided into two test samples. One test sample is not contacted with the virus, while the other test sample is contacted with the virus. The level of expression of the candidate marker in the two test samples is compared.

[0252] In some examples, the cell can contain a cell known to respond favorably to viral therapy vectors or a cell which permits good viral replication. In some examples, the cell can be from a cell-line. Cell-lines that respond favorably or poorly to viral therapy vectors are described herein. The virus can be any virus described herein. Examples of cell-lines known to respond favorably viral therapy vectors can include, but are not limited to PANC-1, MIA PaCa-2, A549, OVCAR-3 and GI-101A, A549, DU145, MEL-888 and MEL-1858.

[0253] In other examples, the cell can be a cell known to respond poorly to viral therapy or to permit a poor level of viral replication. Examples of cell-lines known to respond poorly to viral therapy vectors can include, but are not limited to, PC-3, SiHa, NCI-H1299, MDA-MB-23, MEL-1936 and HT-29.

[0254] Any therapeutic virus described herein can be used in conjunction with the methods to identify markers associated with a biological sample's response to viral therapy, such an anti tumor response. In some examples, the virus can be a virus which is known to be effective in viral therapy. For example, in some examples the virus contains the GLV-1h68 virus. The GLV-1h68 virus is described in U.S. patent application Ser. No. 10/872,156.

[0255] In some examples, methods of identifying a candidate marker include culturing the cells before measuring the level of expression of the candidate marker. The cells can be cultured in vitro according to methods known in the art. Alternatively, the cells can be cultured in vivo. In such methods, the cells can be implanted subcutaneously into an organism, such as a nude mouse. Where the cells are cultured in vivo, the expression levels of markers in the implanted cells or in the tissues of the host organism can be measured.

[0256] The cells contacted with the therapeutic virus can be cultured for a period of time sufficient to detect a response to the virus. In some examples, the period of time can be determined by the sensitivity of the method used to measure the level of expression of at least one marker. For example, the cells contacted with the therapeutic virus can be cultured for about 30 minutes, about 1 hour, about 6 hours about 12 hours, about 1 day, about 2 days, about 3 days, about 4 days, about 5 days, about 6 days, about 7 days, about 8 days, about 9 days, about 10 days, about 11 days, about 12 days, about 13 days, about 14 days, about 2 weeks, about 3 weeks, about 4 weeks, and about 1 month.

[0257] The level of expression of the candidate marker can be measured using methods well known in the art. For example, for RNA, techniques such as microarray analysis, Quantative PCR, Northern hybridization, or any other technique for the quantitation of specific nucleic acids can be used. For a protein marker, methods such as microarray analysis, ELISA assays, Western blotting, or any other technique for the quantitation of specific proteins can be used to measure the expression of a candidate protein marker can be used.

[0258] In some examples of the methods for identifying a marker associated with a favorable or poor response to viral therapy described herein, the step of determining whether the level expression of the candidate marker in cells contacted with a therapeutic virus has decreased, increased, or remained substantially the same, as compared to the expression of the candidate marker in non-contacted cells can be performed by comparing quantitative or semi-quantitative results. In some examples, the difference in expression of the candidate marker between the contacted and non-contacted cells can be about less than 2-fold, about 2-fold, about 3-fold, about 4-fold, about 5-fold, about 6-fold, about 7-fold, about 8-fold, about 9-fold, about 10-fold, about 20-fold, about 30-fold, about 40-fold, about 50-fold, about 60-fold, about 70-fold, about 80-fold, about 90-fold, about 100-fold or greater than about 100-fold.

### H. IDENTIFYING A VIRUS FOR VIRAL THERAPY

[0259] Also provided herein are methods of identifying a candidate virus for viral therapy. Such methods can include assessing whether a candidate virus is likely to be effective in viral therapy, and in particular, whether the candidate virus alters the level of expression of at least one marker in a cell contacted with the candidate virus. In some examples, the cell can be a cell which is known to be responsive to viral therapy vectors. If the expression of the at least one marker is altered by the candidate virus in a manner associated with a favorable response to viral therapy vectors, the candidate virus is likely to be successful as a viral therapy vector.

[0260] In certain examples, methods to identify a candidate virus for viral therapy can include one or more steps. Such steps can include measuring the level of expression of at least one marker in a first cell; measuring the level of expression in the same at least one marker in a second cell contacted with the candidate virus; and determining whether the level of expression of the at least one marker has increased, decreased or remained substantially the same in response to contacting the biological sample, such as a tumor sample, with the candidate virus.

[0261] In some examples, at least one marker can be selected from among the proteins listed in Table 1, Table 2 and Table 3. In some examples, at least one marker encompasses a plurality of markers selected from among the proteins listed in Table 1, Table 2, and Table 3. In some examples, at least 1, at least 5, at least 10, at least 15, at least 20 markers can be selected from among the proteins listed in Table 1, Table 2 and Table 3. In some examples, at least one marker selected for the determining step includes all the proteins listed in Table 1, Table 2, and Table 3. In other examples, at least one marker can be a protein identified by methods described herein.

[0262] In some examples, the cell can be a cell known to respond favorably to viral therapy vectors. Cell-lines that respond favorably or poorly to viral therapy vectors also are described in U.S. Provisional Patent Application Attorney Docket No. 117 “Systems and Methods for Viral Therapy” filed on Oct. 25, 2007 and Nov. 14, 2007. Examples of cell-lines known to respond favorably to the viral therapy vectors can include, but are not limited to, PANC-1, MIA PaCa-2, A549, OVCAR-3 and GI-101A, A549, DU145, MEL-888 and MEL-1858.

[0263] Any therapeutic virus described herein can be used in conjunction with the methods to identify a virus for use in viral therapy.

[0264] In some examples, the cells can be cultured in vitro according to methods known in the art. Alternatively, the cells can be cultured in vivo. In such methods, the cells can be implanted subcutaneously into an organism, such as a nude mouse. Where the cells are cultured in vivo, the level of expression of host markers in response to the candidate virus can be determined.

[0265] The cells contacted with the candidate virus can be cultured for a period of time sufficient to detect a response to the virus. In some examples, the period of time can be determined by the sensitivity of the method used to measure the level of expression of at least one marker. For example, the cells contacted with the therapeutic virus can be cultured f for about 30 minutes, about 1 hour, about 6 hours about 12 hours, about 1 day, about 2 days, about 3 days, about 4 days, about 5 days, about 6 days, about 7 days, about 8 days, about 9 days, about 10 days, about 11 days, about 12 days, about 13 days, about 14 days, about 2 weeks, about 3 weeks, about 4 weeks, and about 1 month.

[0266] The level of expression of the candidate marker can be measured using methods well known in the art. For example, for RNA, techniques such as microarray analysis, Quantative PCR, Northern hybridization, or any other technique for the quantitation of specific nucleic acids can be used. For a protein marker, methods include microarray analysis, ELISA assays, Western blotting, or any other technique for the quantitation of specific proteins can be used to measure the expression of a candidate protein marker.

[0267] In some examples of the methods for assessing whether a candidate virus is likely to be effective in viral therapy described herein, the step of determining whether the level expression of the at least one selected marker in a cell contacted with the candidate virus has decreased, increased, or remained substantially the same, as compared to the expression of the same at least one selected marker in a non-contacted cell can be performed by comparing quantitative or semi-quantitative measurements of the expression levels on the at least one marker. In some examples, the difference in expression of the same selected marker between the contacted and non-contacted cells can be about less than 2-fold, about 2-fold, about 3-fold, about 4-fold, about 5-fold, about 6-fold, about 7-fold, about 8-fold, about 9-fold, about 10-fold, about 20-fold, about 30-fold, about 40-fold, about 50-fold, about 60-fold, about 70-fold, about 80-fold, about 90-fold, about 100-fold or greater than about 100-fold.

[0268] In those examples where the at least one marker is selected from the markers listed in Table 1, an increase in expression of the selected marker in contacted cells as compared to expression of the same marker in a non-contacted cells can indicate that the candidate virus is likely to be effective for viral therapy. Conversely, no increase can indicate that the candidate virus is likely to be less effective for viral therapy. In those examples where the at least one marker is selected from the markers listed in Table 2, a decrease in expression of the selected marker in contacted cells as compared to expression of the same marker in non-contacted cells can indicate that candidate virus is likely to be effective for viral therapy. Conversely, no decrease can indicate that the candidate virus is likely to be less effective for viral therapy. In those examples where the at least one marker is selected from the markers listed in Table 3, no substantial change in the level of expression of the selected marker in a contacted cell as compared to expression of the same marker in non-contacted cells can indicate that the candidate virus is likely to be effective for viral therapy. In such examples where the at least one marker is selected from among the markers listed in Table 3, if desired, evidence of whether a candidate virus is likely to be effective for viral therapy can be corroborated by measuring the level of expression of markers one or more markers from Table 1 and Table 2.

### I. ARTICLES OF MANUFACTURE AND KITS

[0269] Also, provided herein are kits. Kits can contain reagents, devices or instructions for use thereof. A kit can contain a variety of components. Components can include reagents to measure the expression level of at least one marker associated with a favorable or a poor response to viral therapy; at least one therapeutic virus; a therapeutic agent; a pharmaceutical composition; a reagent or device to administer viral therapy; a host cell containing a therapeutic virus; a reagent or device to obtain a biological sample; or reagents to measure the presence of a therapeutic virus in a subject.

[0270] In some examples, a kit can contain reagents to measure the expression level of one or more markers associated with a favorable and/or poor response to viral therapy. Such kits can contain means for, or components for measuring particular protein levels in a biological sample, such as, monoclonal antibodies specific to a particular protein; or a means or component for measuring particular mRNA levels in a biological sample, such as, nucleic acid probes specific for RNA encoding the marker.

[0271] In some examples, a kit can contain at least one therapeutic virus. In some kits, a plurality of viruses designed for viral therapy can be supplied. Such kits can be provided to determine whether a subject responds favorably to any virus of the kit.

[0272] In one example, a kit can contain instructions. Instructions typically include a tangible expression describing the virus and, optionally, other components included in the kit, and methods for administration, including methods for determining the health status of the subject, the proper dosage amount, and the proper administration method, for administering the virus. Instructions can also include guidance for monitoring the progress of the subject over the duration of the treatment time.

[0273] In some examples, a kit can include a device for administering a virus to a subject. Any of a variety of devices known in the art for administering medications or vaccines can be included in the kits provided herein. Exemplary devices include a hypodermic needle, an intravenous needle, a catheter, a needle-less injection device, an inhaler, and a liquid dispenser such as an eyedropper. Typically, the device for administering a virus of the kit will be compatible with the virus of the kit; for example, a needle-less injection device such as a high pressure injection device can be included in kits with viruses not damaged by high pressure injection, but is typically not included in kits with viruses damaged by high pressure injection.

[0274] In some examples, a kit can include a device for administering a therapeutic agent to a subject. Any of a variety of devices known in the art for administering medications to a subject can be included in the kits provided herein. Exemplary devices include a hypodermic needle, an intravenous needle, a catheter, a needle-less injection device, an inhaler, and a liquid dispenser. Typically the device for administering the therapeutic agent will be compatible with the desired method of administration of the therapeutic agent. For example, a therapeutic agent to be delivered subcutaneously can be included in a kit with a hypodermic needle and syringe.

### J. EXAMPLES

[0275] The following examples are included for illustrative purposes only and are not intended to limit the scope of the invention.

### Example 1

### Construction of Viruses for Use in Anti-Cancer Efficacy Assays

[0276] Viruses for use in exemplary assays to assess the efficacy of viruses for anti-cancer treatment were generated by modification of the vaccinia virus strain designated LIVP (a vaccinia virus strain, originally derived by adapting the Lister strain (ATCC Catalog No. VR-1549) to calf skin (Institute for Research on Virus Preparations, Moscow, Russia, Al'tshtein et al. (1983) Dokl. Akad. Nauk USSR 285:696-699). The LIVP strain (whose genome sequence is set forth in SEQ ID NO: 1) from which the viral strains were generated contains a mutation in the coding sequence of the thymidine kinase (TK) gene in which a substitution of a guanine nucleotide with a thymidine nucleotide (nucleotide position 80207 of SEQ ID NO: 1) introduces a premature STOP codon within the coding sequence. The LIVP strain was further modified to generate the GLV-1h68 virus (SEQ ID NO: 2; U.S. Patent Publication No. 2005-0031643 and Japanese Patent No. 3,934,673).

[0277] As described in U.S. Patent Publication No. 2005/0031643 and Japanese Patent No. 3,934,673 (see particularly Example 1 in each application), GLV-1h68 was generated by inserting expression cassettes encoding detectable marker proteins into the F14.5L (also designated in LIVP as F3) gene, thymidine kinase (TK) gene, and hemagglutinin (HA) gene loci of the vaccinia virus LIVP strain. All cloning steps were performed using vaccinia DNA homology-based shuttle plasmids generated for homologous recombination of foreign genes into target loci in the vaccinia virus genome through double reciprocal crossover (see Timiryasova et al. (2001) BioTechniques 31(3) 534-540). As described in U.S. Patent Publication 2005/0031643 and Japanese Patent No. 3,934,673, the GLV-1h68 virus was constructed using plasmids pSC65 (Chakrabarti et al. (1997) Biotechniques 23:1094-1097) and pVY6 (Flexner et al. (1988) Virology 166:339-349) to direct insertions into the TK and HA loci of LIVP genome, respectively. Recombinant viruses were generated by transformation of shuttle plasmid vectors using the FuGENE 6 transfection reagent (Roche Applied Science, Indianapolis, Ind.) into CV-1 cells (ATCC Cat No. CR1-1469), which were pre-infected with the LIVP parental virus, or one of its recombinant derivatives.

[0278] The expression cassettes were inserted in the LIVP genome in three separate rounds of recombinant virus production. In the first round, an expression cassette containing a Ruc-GFP cDNA (a fusion of DNA encoding Renilla luciferase and DNA encoding GFP) under the control of a vaccinia synthetic early/late promoter P_{SEL} was inserted into the Not I site of the F14.5L gene locus. In the second round, the resulting recombinant virus from the first round was further modified by insertion of an expression cassette containing DNA encoding beta-galactosidase (LacZ) under the control of the vaccinia early/late promoter P_{7.5k} (denoted (P_{7.5k})lacZ) and DNA encoding a rat transferrin receptor positioned in the reverse orientation for transcription relative to the vaccinia synthetic early/late promoter P_{SEL} (denoted (P_{SEL})rTrfR) was inserted into the TK gene (the resulting virus does not express transferrin receptor protein since the DNA encoding the protein is positioned in the reverse orientation for transcription relative to the promoter in the cassette). In the third round, the resulting recombinant virus from the second round was then further modified by insertion of an expression cassette containing DNA encoding β-glucuronidase under the control of the vaccinia late promoter P₁₁ₖ (denoted (P₁₁ₖ)gusA) was inserted into the HA gene. The resulting virus containing all three insertions is designated GLV-1h68. The complete sequence of GLV-1h68 is shown in SEQ ID NO:2.

[0279] The expression of the Ruc-GFP fusion protein by the recombinant virus was confirmed by luminescence assay and fluorescence microscopy. Expression of β-galactosidase and β-glucuronidase were confirmed by blue plaque formation upon addition of 5-bromo-4-chloro-3-indolyl-β-D-galactopyranoside (X-gal, Stratagene, La Jolla, Calif.) and 5-bromo-4-chloro-3-indolyl-β-D-glucuronic acid (X-GlcA, Research Product International Corporation, Mt. Prospect, Ill.), respectively. Positive plaques formed by recombinant virus were isolated and purified. The presence of expression cassettes in the F14.5L, TK and HA loci were also confirmed by PCR and DNA sequencing.

[0280] High titer viral preparations were obtained by centrifugation of viral precipitates in sucrose gradients (Joklik W K (1962) Virol. 18:9-18). For testing infection, CV-1 (1×10⁵) and GI-101A (4×10⁵) cells (Dr. A. Aller, Rumbaugh-Goodwin Institute for Cancer Research, Inc., Plantation, Fla.) were seeded onto 24-well plates. After 24 hours in culture, the cells were infected with individual viruses at a multiplicity of infection (MOI) of 0.001. The cells were incubated at 37° C. for 1 hour with brief agitation every 10 minutes to allow infection to occur. The infection medium was removed, and cells were incubated in fresh growth medium until cell harvest at 24, 48, 72, or 96 hours after infection. Viral particles from the infected cells were released by a quick freeze-thaw cycle, and the titers determined as pfu/ml of medium in duplicate by plaque assay in CV-1 cell monolayers. The same procedure was followed using a resting CV-1 cell culture, which was obtained by culturing a confluent monolayer of CV-1 cells for 6 days in DMEM supplemented with 5% FBS, before viral infection.

### Example 2

### Replication of GLV-1h68 Vaccinia Virus in Different Tumor Cell Types Materials and Methods

[0281] Cell Lines Employed

[0282] A panel of well-characterized human cancer cell lines of different histological derivation was employed in the studies described herein. All cell lines except noted were purchased from American Type Culture Collection (Manassas).

[0283] MDA MB-231 (ATCC Cat No. HTB-26), PANC-1 (ATCC Cat No. CRL-1469), CV-1 (ATCC Cat No. CRL-1469) and PC-3 (ATCC Cat No. CRL-1435) cells were cultured in Dulbecco's modified Eagle's medium (DMEM) supplemented with 10% fetal bovine serum (FBS) and 1% antibiotic-antimycotic solution (AA) (100 U/ml penicillin G, 250 ng/ml amphotericin B, 100). MIA PaCa-2 (ATCC Cat No. CRL-1420) cells were cultured under similar conditions in DMEM media supplemented with 12.5% FBS and 2 mM L-glutamine. SiHa (ATCC Cat No. HTB-35) cells were cultured in Eagle's minimal essential medium (EMEM) supplemented with 10% FBS, 1% non-essential amino acids (NEAA), 1 mM sodium pyruvate and 1% AA.

[0284] All other cells were cultured in Roswell Park Memorial Institute medium (RPMI) supplemented with the following compounds: A549 (ATCC Cat No. CCL-185) and HT-29 (ATCC Cat No. HTB-38) cells (10% FBS and 1% AA); GI-101A cells (Dr. A. Aller, Rumbaugh-Goodwin Institute for Cancer Research, Inc., Plantation, Fla.; 20% FBS, 4.5 g/L glucose, 10 mM HEPES, 1 mM sodium pyruvate, 1% AA and 4 ng/ml β-estradiol, 5 ng/ml progesterone); NCI-H1299 (ATCC Cat No. CRL-580) cells (10% FBS, 4.5 g/L glucose, 10 mM HEPES, 1 mM sodium pyrucate, 1% AA); and OVCAR-3 (ATCC Cat No. HTB-161) cells (20% FBS, 2.3 g/L glucose, 10 mM HEPES, 1 mM sodium pyruvate, 1% AA and 4 ng/ml β-estradiol, 5 ng/ml progesterone and human Insulin). Three additional cell lines from distinct cutaneous melanoma metastases obtained from patient 888 (Dr. Francesco Marincola, National Institutes of Health; Wang et al. (2006) J Invest Dermatol. 126(6):1372-7; Sabatino, M., et al. (2008) Cancer Res 68:222-231) were included in the tests. 888-MEL, 1858-MEL and 1936-MEL cells were cultured in RPMI supplemented with 10% FBS, 1 mM HEPES, 1 mM Ciprofloxacin and L-glutamine/penicillin/streptomycin. All cell cultures were carried out at 37° C. under 5% CO₂.

[0285] In Vitro Viral Replication Assay

[0286] The cells, described above, were seeded in 24-well plates at a density of 2-4×10⁵ cells per well and were infected with GLV-1h68 at a MOI of 0.01 after 24 hours of culture (Zhang, Q. et al. (2007) Cancer Res 67:10038-10046). The cells were incubated at 37° C. for 1 h with brief agitation every 10 min to allow infection to occur. The infection medium was removed, and cells were incubated in fresh growth medium until cell harvest at 24, 48 or 72 h after infection. Viral particles from the infected cells were released by a quick freeze-thaw cycle, and the titers determined in duplicate as pfu/ml of medium by standard plaque assay in CV-1 cell monolayers. The same procedure was followed using a resting CV-1 cell culture, which was obtained by culturing a confluent monolayer of CV-1 cells for 6 days in DMEM supplemented with 5% FBS before viral infection. Data for the average viral titers at 0, 24, 48 and 72 hours post infection is shown in Tables 5A-5L.

TABLE 5A
Viral titer values for PANC-1

| Hours Post | Average Viral Titer | Standard Deviation |
|---|---|---|
| Infection | (Log pfu/10⁶ cells) | (Log pfu/10⁶ cells) |
| 0 | 4.00 | 0.00 |
| 24 | 4.45 | 0.07 |
| 48 | 6.47 | 0.07 |
| 72 | 7.06 | 0.06 |

TABLE 5B
Viral titer values for MIA PaCa-2

| Hours Post | Average Viral Titer | Standard Deviation |
|---|---|---|
| Infection | (Log pfu/10⁶ cells) | (Log pfu/10⁶ cells) |
| 0 | 4.00 | 0.00 |
| 24 | 5.31 | 0.11 |
| 48 | 7.07 | 0.16 |
| 72 | 7.45 | 0.06 |

TABLE 5C
Viral titer values for A549

| Hours Post | Average Viral Titer | Standard Deviation |
|---|---|---|
| Infection | (Log pfu/10⁶ cells) | (Log pfu/10⁶ cells) |
| 0 | 4.00 | 0.00 |
| 24 | 6.26 | 0.05 |
| 48 | 7.37 | 0.19 |
| 72 | 7.55 | 0.09 |

TABLE 5D
Viral titer values for OVCAR-3

| Hours Post | Average Viral Titer | Standard Deviation |
|---|---|---|
| Infection | (Log pfu/10⁶ cells) | (Log pfu/10⁶ cells) |
| 0 | 4.00 | 0.00 |
| 24 | 4.59 | 0.06 |
| 48 | 6.12 | 0.34 |
| 72 | 6.20 | 0.03 |

TABLE 5E
Viral titer values for GI-101A

| Hours Post | Average Viral Titer | Standard Deviation |
|---|---|---|
| Infection | (Log pfu/10⁶ cells) | (Log pfu/10⁶ cells) |
| 0 | 4.00 | 0.00 |
| 24 | 5.24 | 0.27 |
| 48 | 6.04 | 0.02 |
| 72 | 6.60 | 0.07 |

TABLE 5F
Viral titer values for PC-3

| Hours Post | Average Viral Titer | Standard Deviation |
|---|---|---|
| Infection | (Log pfu/10⁶ cells) | (Log pfu/10⁶ cells) |
| 0 | 4.00 | 0.00 |
| 24 | 4.11 | 0.07 |
| 48 | 5.95 | 0.12 |
| 72 | 5.90 | 0.11 |

TABLE 5G
Viral titer values for SiHa

| Hours Post | Average Viral Titer | Standard Deviation |
|---|---|---|
| Infection | (Log pfu/10⁶ cells) | (Log pfu/10⁶ cells) |
| 0 | 4.00 | 0.00 |
| 24 | 4.09 | 0.07 |
| 48 | 5.57 | 0.15 |
| 72 | 5.93 | 0.41 |

TABLE 5H
Viral titer values for NCI-H1299

| Hours Post | Average Viral Titer | Standard Deviation |
|---|---|---|
| Infection | (Log pfu/10⁶ cells) | (Log pfu/10⁶ cells) |
| 0 | 4.00 | 0.00 |
| 24 | 4.08 | 0.07 |
| 48 | 5.08 | 0.10 |
| 72 | 6.17 | 0.08 |

TABLE 5I
Viral titer values for MDA-MB-231

| Hours Post | Average Viral Titer | Standard Deviation |
|---|---|---|
| Infection | (Log pfu/10⁶ cells) | (Log pfu/10⁶ cells) |
| 0 | 4.00 | 0.00 |
| 24 | 3.38 | 0.11 |
| 48 | 4.90 | 0.16 |
| 72 | 5.82 | 0.13 |

TABLE 5J
Viral titer values for 888-MEL

| Hours Post | Average Viral Titer | Standard Deviation |
|---|---|---|
| Infection | (Log pfu/10⁶ cells) | (Log pfu/10⁶ cells) |
| 0 | 4.00 | 0.00 |
| 24 | 4.94 | 0.02 |
| 48 | 6.19 | 0.12 |
| 72 | 6.39 | 0.12 |

TABLE 5K
Viral titer values for 1858-MEL

| Hours Post | Average Viral Titer | Standard Deviation |
|---|---|---|
| Infection | (Log pfu/10⁶ cells) | (Log pfu/10⁶ cells) |
| 0 | 4.00 | 0.00 |
| 24 | 4.98 | 0.07 |
| 48 | 5.63 | 0.05 |
| 72 | 6.27 | 0.01 |

TABLE 5L
Viral titer values for 1936-MEL

| Hours Post | Average Viral Titer | Standard Deviation |
|---|---|---|
| Infection | (Log pfu/10⁶ cells) | (Log pfu/10⁶ cells) |
| 0 | 4.00 | 0.00 |
| 24 | 5.06 | 0.10 |
| 48 | 6.01 | 0.03 |
| 72 | 6.08 | 0.20 |

[0287] The cell lines were divided into groups of predicted responders and non-responders based on the ability of the virus to exhibit significant replication within the cells within 24 hours post infection. Cell types that exhibited an approximate 4-fold or greater increase in viral titer over input titer were designated as in vitro responders. Table 6 displays the fold increase in viral titer between consecutive time points.

TABLE 6
Predicted Responders and Non-responders based on in vitro
replication assays

| | | Fold Increase | | |
|---|---|---|---|---|
| | | 24 h.p.i./ | 48 h.p.i./ | 72 h.p.i./ |
| | Cell Line | Input | 24 h.p.i. | 48 h.p.i. |
| In vitro | A549 | 183.69 | 12.85 | 1.49 |
| responders | HT-29 | 24.96 | 6.39 | 1.53 |
| | MIA PaCa-2 | 20.53 | 56.68 | 2.43 |
| | GI-101A | 17.38 | 6.31 | 3.63 |
| | 888-MEL | 8.78 | 17.59 | 1.58 |
| | 1858-MEL | 9.45 | 4.48 | 4.43 |
| | 1936-MEL | 11.53 | 8.82 | 1.19 |
| | PANC-1 | 2.81 | 104.92 | 3.88 |
| | OVCAR-3 | 3.93 | 33.38 | 1.21 |
| In vitro | SiHa | 1.22 | 30.55 | 2.27 |
| non- | NCI-H1299 | 1.21 | 9.87 | 12.52 |
| responders | MDA MB-231 | 0.24 | 33.63 | 8.34 |
| | PC-3 | 1.28 | 70.01 | 0.88 |

h.p.i. = hours post viral infection

### Example 3

### In Vivo Tumor Regression Following GLV-1h68 Vaccinia Virus Treatment of Different Xenograft Tumors

[0288] In order to determine whether the in vitro replication profile correlated with efficacy in vivo, each cell line was tested for sensitivity to the oncolytic activity of systemically administered GLV-1h68 using tumor xenograft mouse models (Sabatino, M. et al. (2008) Cancer Res 68:222-231; Jones, C. B. et al. (1997) Cancer Chemother. Pharmacol. 40:475-483; Schultz, R. M. et al. (1993) Oncol. Res. 5:223-228; Roschke, A. V. et al. (2003) Cancer Res. 63:8634-8647; Ahn, W. S. et al. (2005) Gene Ontology. Int. J. Gynecol. Cancer 15:94-106).

[0289] 6-8 week old nude mice (NCI:Hsd:Athymic Nude-Foxn1^{nu}, Harlan) were inoculated with 5×10⁶ cells per mouse to obtain subcutaneous xenografts as previously described (Zhang, Q. et al. (2007) Cancer Res 67:10038-10046). Thirty days after tumor cell implantation, a single intravenous inoculation of 1×10⁶ pfu of GLV-1h68 virus in a final volume of 100 μl PBS or PBS only as a control was delivered to the mice by femoral vein injection. Tumor growth was measured once a week before and after viral infection and tumor mass was reported in mm³. After inoculation with GLV-1h68, the expression of green fluorescent protein (due to the Ruc-GFP fusion protein encoded by the GLV-1h68 virus) within the tumors was also monitored under UV-light.

[0290] Two characteristic patterns of tumor growth were identified: some tumors progressively continued their growth independent of therapy (i.e. PC-3, HT-29; see Tables 7A and 7B), while some exhibited three phases of growth (Zhang, Q. et al. (2007) Cancer Res 67:10038-10046). The first phase during the first few weeks is characterized by a slightly faster expansion in the mass of tumors receiving treatment compared to control tumors. This initial rapid expansion may be related to an ongoing inflammatory process. The expansion phase was followed by a plateau phase and then by shrinkage of the tumor masses (i.e. GI-101A; see Table 7C). These patterns were cell line-specific and highly reproducible independent of GLV-1h68 plaque forming units (PFUs) injected or cancer cells inoculated. While the kinetics of growth and disappearance varied according to the various experimental conditions applied (PFUs of virus administered and number of cancer cells administered), the final outcome (tumor growth versus tumor regression) was highly reproducible for each tumor type tested.

[0291] During the initial growth phase, fluorescent light emission from tumors non-responding to therapy (i.e. HT-29) displayed a patchy pattern that did not significantly differ from that of tumors eventually responding to treatment (i.e. GI-101A), though the GI-101 tumor had a higher expression of the Ruc-GFP fusion protein.

TABLE 7A
Median tumor volumes at different time points after i.v. injection of
GLV-1h68 into nude mice bearing PC-3 tumors

| | |
|---|---|
| Days post- | Median tumor |
| implantation | volume (mm³) |

| of tumor | No | GLV- |
|---|---|---|
| cells | Treatment | 1h68 |
| 63 | 323.5 | 373.15 |
| 71 | 322.05 | 446.1 |
| 78 | 408.9 | 546.15 |
| 86 | 549.7 | 679.8 |
| 105 | 1114.85 | 1335.35 |
| 114 | 1522.8 | 1499.9 |
| 133 | 2719.8 | 2685.2 |
| 149 | 3120.1 | 3342.45 |

TABLE 7B
Median tumor volumes at different time points after i.v. injection of
GLV-1h68 into nude mice bearing HT-29 tumors

| | |
|---|---|
| Days post- | Median tumor |
| implantation | volume (mm³) |

| of tumor | No | GLV- |
|---|---|---|
| cells | Treatment | 1h68 |
| 16 | 180.06 | 197.39 |
| 23 | 472.56 | 472.79 |
| 30 | 1038.11 | 1049.85 |
| 37 | 1879.03 | 1734.03 |
| 44 | 2919.53 | 2687.96 |
| 50 | 3638.63 | 3036.29 |
| 57 | 5255.73 | 4244.63 |

TABLE 7C
Median tumor volumes at different time points after i.v. injection of
GLV-1h68 into nude mice bearing GI-101A tumors

| | |
|---|---|
| Days post- | Median tumor |
| implantation | volume (mm³) |

| of tumor | No | GLV- |
|---|---|---|
| cells | Treatment | 1h68 |
| 33 | 240.8 | 248.4 |
| 36 | 263.6 | 243.8 |
| 43 | 579.1 | 550.4 |
| 50 | 636.4 | 761.3 |
| 57 | 671.6 | 852.0 |
| 64 | 904.3 | 1118.2 |
| 71 | 1235.9 | 1302.0 |
| 78 | 1431.8 | 1225.2 |
| 82 | 1888.1 | 1233.5 |
| 85 | 2166.5 | 1295.9 |
| 89 | 2548.0 | 1083.2 |
| 92 | 2715.6 | 1053.6 |
| 97 | 2918.3 | 962.2 |
| 102 | 3471.5 | 809.1 |
| 110 | nd | 818.4 |
| 118 | nd | 629.9 |

[0292] To provide a single parameter descriptive of individual cell line responsiveness to virus therapy, a therapeutic index (T.I.) was calculated for each tumor by integrating the areas between the median growth of control and treated xenografts (eight animals per group) during the first 45 days of treatment. The therapeutic index was calculated as:

therapeutic index=(A−B)/A

where A is the area under the untreated control curve, and B is the area under the virus treatment curve, with both areas being from time of virus infection to 45 days post virus treatment. Table 8 lists the therapeutic indices calculated for the various xenograft tumors tested.

TABLE 8

| Responders | | | Poor/Non-Responders | | |
|---|---|---|---|---|---|
| Cell Line | | | Cell Line | | |
| Name | Description | TI | Name | Description | TI |
| 1858-MEL | Melanoma | 90.1 | MB-231 | Breast | 21.6 |
| | | | | Adenocarcinoma | |
| 888-MEL | Melanoma | 88.0 | SiHa | Cervical Squamous | 15.6 |
| | | | | Cell Carcinoma | |
| MIA PaCa-2 | Pancreatic Carcinoma | 80.1 | 1936-MEL | Melanoma | 13.7 |
| A549 | Lung Carcinoma | 62.8 | PC-3 | Prostate | 8.6 |
| | | | | Adenocarcinoma | |
| OVCAR-3 | Ovarian Carcinoma | 56.2 | NCI- | Breast | −2.3 |
| | | | H1299 | Adenocarcinoma | |
| PANC-1 | Pancreatic Carcinoma | 50.9 | HT-29 | Colorectal Carcinoma | −19.0 |
| DU145 | Prostate Cancer | 48.4 | | | |
| GI-101A | Breast Carcinoma | 27.9 | | | |

TI = Therapeutic Index

### Comparison of In Vitro and In Vivo Test Results

[0293] In the in vitro replication assay, four of four cell lines that resisted virus replication during the first 24 hours following infection (MDA MB-231, PC-3, SiHa and NCI-H1299) uniformly produced xenografts non-responding to vaccinia virus (VACV) therapy in vivo. Eight out of ten cell lines that allowed viral replication in the first 24 hours yielded xenografts responsive to vaccinia virus treatment in vivo, while two cell lines (HT-29 and 1936-MEL) yielded xenografts that did not respond to virus treatment. Notwithstanding the two outliers, the relationship between the permissivity of a given cell line to in vitro replication rate of GLV-1h68 and the in vivo responsiveness of the corresponding xenograft was statistically significant (Fisher exact test p₂-value=0.005).

[0294] The difference in responder versus non-responder cell lines was not limited to particular cell lines of diverse ontogeny. 888-MEL and 1936-MEL, two autologous melanoma cell lines, exhibited differences in in vivo responsiveness to virus treatment, though they displayed the same degree of permissivity in vitro to GLV-1h68 replication. 888-MEL and 1936-MEL are derived from the same ancestral progenitor though established from two distinct melanoma metastases (Sabatino, M. et al. (2008) Cancer Res 68:222-231; Wang, E. et al. (2006) J Invest Dermatol 126:1372-1377). The first cell line (888-MEL) was removed in 1989 during earlier stages of disease at a time when the patient underwent a complete remission of all metastatic disease following adoptive transfer of tumor infiltrating lymphocytes; the second (1936-MEL), was expanded 12 years later from a metastasis excised at a time when the patient had rapidly progressing disease and did not respond to further therapy. The early cell line was highly sensitive to treatment (T.I.=88.0) and was completely eradicated by the oncolytic virus administration while the later cell line 1936-MEL was completely resistant (T.I.=13.7), continuing its growth with identical kinetics between treated and untreated animals. These data suggest that responsiveness is related to biological characteristics of the tumors independent of their ontogeny and is more likely related to evolving phenotypic alterations occurring during the natural history of the disease.

### Example 4

### In Vivo Viral Replication in Responder Versus Poor/Non-Responder Tumor Types

[0295] To further investigate the reasons for the lack of in vivo responsiveness of xenografts derived by distinct cell lines, the in vivo behavior of three cell lines (GI-101A, HT-29 and PC-3), which demonstrated different and representative patterns of in vitro permissivity to GLV-1h68 replication and in vivo outcomes, was examined. Although viral replication in vivo was similar in the growth phase of GI-101A and HT-29 xenografts and comparable light emitting properties were observed, viral titer studies showed that viral replication was delayed in vivo in HT-29 xenografts as they continued their growth while it remained elevated in the regressing GI-101A xenografts.

[0296] Table 9 shows the in vivo viral titers (PFU/gram of xenograft) as an average of eight individual experiments for each treatment group comparing the permissivity of three xenografts derived from GI-101A colorectal cancer, HT-29 breast cancer and PC-3 prostate adenocarcinoma tumors. A dichotomy was observed between responding and non-responding xenografts equally permissive to GLV-1h68 in vitro but not in vivo. Moreover, PC-3 xenografts, in spite of delaying in vitro replication of vaccinia virus, allowed replication in vivo of GLV-1h68 at a rate similar to HT-29 at day 21 and intermediate between HT-29 and GI-101A at day 42. In view of the replication and tumor regression data described above, delayed replication in vivo or in vitro appeared to decrease the likelihood of tumor regression while tumor regression was associated with effective viral replication in vitro and in vivo.

TABLE 9
Virus replication in vivo

| Days | GI-101A | | HT-29 | | PC-3 | |
|---|---|---|---|---|---|---|
| Post Infection | pfu/g | STDEV | pfu/g | STDEV | pfu/g | STDEV |
| 7 | 1.05E+07 | 4.90E+06 | 3.89E+06 | 1.11E+06 | 2.65E+07 | 3.56E+07 |
| 21 | 3.53E+08 | 1.90E+08 | 6.45E+07 | 9.12E+07 | 7.54E+07 | 8.05E+07 |
| 42 | 3.77E+08 | 2.42E+08 | 1.12E+08 | 1.56E+08 | 3.16E+08 | 4.03E+08 |

### Example 5

### Viral Infectivity of Various Tumor Cell Lines

[0297] To determine whether the results obtained in the in vitro viral replication assay and/or in vivo tumor regression study were affected by the ability of vaccinia virus to infect the tumor cells, a test for viral infectivity of three vaccinia viruses (GLV-1h68, LIVP and Western Reserve Strain WR) was performed. Cells were plated in 24 well plates at a density of 2×10⁵ cells/well (A549, HT-29, MIA PaCa-2, GI-101A, PANC-1, OVCAR-3, SiHa, NCI-H1299 and MDA MB-231) or 3×10⁵ cells/well (PC-3 and DU-145, ATCC Catalog No. HTB-81). Cells were infected in duplicate or triplicate with 1×10⁵, 1×10⁶, 1×10⁷, 5×10⁷ dilutions of each virus (GLV-1h68, LIVP or WR) for 1 h and then overlayed with 1 ml of corresponding cell medium. Viral titer was then determined by crystal violet staining (plaque assay). The infectivity of the various tumor cell lines tested is shown in Table 10. The results show that the degree of viral infectivity does not correlate with the efficacy of the virus to cause tumor regression or replicate within the tumor cell.

TABLE 10
Viral infectivity of various tumor cell lines

| Cell Type | Titer (pfu) |
|---|---|
| A549 | 3.63E+09 |
| HT-29 | 1.63E+09 |
| MIA PaCa-2 | 1.50E+09 |
| GI-101A | 1.05E+09 |
| PANC-1 | 7.25E+08 |
| DU-145 | 1.35E+08 |
| OVCAR-3 | 6.50E+07 |
| SiHa | 3.50E+09 |
| NCI-H1299 | 1.27E+09 |
| MDA MB-231 | 6.00E+08 |
| PC-3 | 1.65E+08 |

### Example 6

### Microarray Analysis of In Vivo and In Vitro Gene Expression in Responder Versus Poor/Non-Responder Tumor Types

[0298] The comparison between in vitro and/or in vivo virus replication patterns and in vivo regression of different cell lines exposed to GLV-1h68 suggested a complex relationship between vaccinia virus, cancer cells and the host. To further examine these relationships, the gene expression patterns of vaccinia virus, human cancer cells and mouse host cells in responding and non-responding xenografts excised at times relevant to the kinetics of their response were examined. Transcriptional profiling was achieved though the use of organism-specific microarray platforms.

### Preparation of Test Samples

[0299] In vivo tumor samples from virus treated and untreated tumors were prepared for microarray analysis. Tumor xenograft models for GI-101A breast carcinoma, HT-29 colorectal carcinoma or PC-3 prostate adenocarcinoma were prepared as described above. Thirty days after tumor cell implantation, 1×10⁶ pfu of GLV-1h68 virus (in 100 μl PBS) or PBS only as control was administered to the mice by femoral vein injection. At selected days post virus infection, 3-4 animals from each of the treatment groups and 3-4 animals from the control groups were sacrificed and the tumors were excised. For GI-101A, the treatment groups included 1, 7, 21 and 42 days post virus infection. For HT-29 and PC-3, the treatment groups included 21 and 42 days post virus infection.

[0300] In vitro cell culture samples also were prepared for microarray analysis. GI-101A, HT-29 and PC-3 cells were seeded in 24-well plates and infected with GLV-1h68 at a MOI of 0.01. Cells were harvested at six and twelve hours post virus infection.

[0301] Total RNA from excised tumors was isolated after homogenization using Trizol (Invitrogen) reagent according to the manufacturer's instructions. Total RNA from cell cultures was isolated with the Qiagen RNeasy Mini kit according to the manufacturer's instructions and the quality of obtained total RNA was tested with an Agilent Bioanalyzer 2000 (Agilent Technologies). For expression studies based on cDNA and oligo array techniques, total RNA was amplified into antisense RNA as described in Wang, E. et al. (2000) Nature Biotech 17:457-459 and Wang, E. (2005) J. Transl. Med. 3:28.

[0302] Mouse reference RNA was prepared by homogenization and pooling of selected mouse tissues (lung, heart, muscle, kidneys, liver and spleen) from three female C57B1/6 mice. Reference RNA for human arrays was obtained by pooling peripheral blood mononuclear cells (PBMCs) from four normal donors. Human and mouse reference total RNA was amplified into antisense RNA as described in Wang, E. et al. (2000) Nature Biotech 17:457-459 and Wang, E. (2005) J. Transl. Med. 3:28. Five μg RNA of selected tumor and cell samples were amplified according to the Affymetrix manual using the GeneChip® One-Cycle Target Labeling and Control kit.

### Microarray Performance and Statistical Analysis

[0303] Confidence in array quality was determined as described Jin, P. et al. (2004) BMC Genomics 5:55). For 36 k whole genome mouse and human array performances, reference and amplified test RNA were directly labeled using a ULS™ aRNA Fluorescent Labeling kit (Kreatech Biotechnology) with Cy3 for reference and Cy5 for test samples and were co-hybridized to the slides (Worschech, A. et al. (2008) Cancer Res. 68:2436-2446). 17 k human cDNA arrays were carried out as described according to standard methods for labeling and array hybridization (Basil, C. F. et al. (2006) Cancer Res 66:2953-2961). A customized Vaccinia Virus-GLV-1h68 Affymetrix expression array was specifically prepared for this study. Amplified RNA from tumor or cell samples was handled according to the manufacturer's instructions for eukaryotic sample processing and hybridized to the arrays. After 16 h incubation in the hybridization oven at 45° C., the arrays were washed and stained in the Fluidics station using the GeneChip® Hybridization, Wash, and Stain Kit (Affymetrix).

[0304] Resulting data files from both array types, Affymetrix and in house spotted arrays, were uploaded to the mAdb databank (nciarray.nci.nih.gov) and further analyzed using BRBArrayTools developed by the Biometric Research Branch, National Cancer Institute (linus.nci.nih.gov/BRB-ArrayTools.html) (Simon, R. et al. (2007) Cancer Informatics 2:11-17) and Cluster and TreeView software (Eisen, M. B. et al. (1998) Proc Natl. Acad. Sci. USA 95:14863-14868). Multiple dimensional scaling was performed using the BRB-array tool.

[0305] Retrieved data from the Affymetrix platform were normalized using median over entire array as reference because of single color labeling technology. For all array types, unsupervised analysis was used for class confirmation using the Stanford Cluster program (80% gene presence across all experiments and at least 3-fold ratio change) and Treeview program for visualization. Gene ratios were average corrected across experimental samples and displayed according to an uncentered correlation algorithm. Class comparison was performed using parametric unpaired Student's t test or three-way ANOVA to identify differentially expressed genes among GLV-1h68 infected and uninfected tumors or cells at various time points using different significance cutoff levels as demanded by the statistical power of each test. Subsequent filtering (80% gene presence across all experiments and at least 3-fold ratio change) narrowed down the number of genes that were expressed differentially between experimental groups.

[0306] Statistical significance and adjustments for multiple test comparisons were based on univariate and multivariate permutation test as previously described. Previous studies have shown that the present method for RNA amplification is robust yielding results comparable to those obtained by quantitative PCR (qPCR) (Jin, P. et al. (2004) BMC Genomics 5:55; Feldman, A. L. et al. (2002) Biotechniques 33:906-914; Nagorsen, D. et al. (2005) Genome Biol 6:R15). Additional quantitative PCR can be performed to confirm changes in expression of individual genes.

### Microarray Results

[0307] 1. Transcriptional Differences Between Responding Xenografts Versus Non-Responding Xenografts to Systemic GLV-1h68 Administration: Vaccinia Virus (VACV) Signatures

[0308] Vaccinia virus (VACV) gene expression was assessed by a custom-made VACV array platform (VACGLa520445F, Affymetrix, CA). The array platform (See Table 11) included 308 probes representing 219 genes that covered the combined genome of several vaccinia virus strains; exogenous constructs specific to GLV-1h68 virus, such as the Renilla luciferase-Aequorea green fluorescent fusion protein; and 393 probes representing 337 human or mouse “house keeping” genes.

TABLE 11
VACV Array Platform Genes

| Name | SEQ ID NO | COP | Annotation |
|---|---|---|---|
| VACGL001 | 159 | C23L/B29R | chemokine-binding protein |
| VACGL003 | 160 | — | fragment of Tumor necrosis factor |
| | | | receptor |
| VACGL004 | 161 | C22L/B28R | TNF-alpha-receptor-like |
| VACGL005 | 162 | — | ankyrin-like protein[Vaccinia] |
| VACGL006 | 163 | C18L/B24R | similar to putative C18L[VacCop] |
| VACGL007 | 164 | C17L/B23R | similar to putative C17L[VacCop] |
| VACGL008 | 165 | C17L/B23R | similar to putative C17L[VacCop] |
| VACGL009 | 166 | C12L | serine protease inhibitor-like SPI-1 |
| VACGL010 | 167 | C11R | secreted epidermal growth factor-like |
| VACGL011 | 168 | C10L | unknown |
| VACGL013 | 169 | — | zinc finger-like protein |
| VACGL014 | 170 | — | zinc finger-like protein |
| VACGL015 | 171 | — | interleukin-18-binding protein |
| VACGL016 | 172 | — | ankyrin-like protein |
| VACGL017 | 173 | — | ankyrin-like protein |
| VACGL018 | 174 | — | ankyrin-like protein |
| VACGL019 | 175 | — | ankyrin-like protein[vaccinia] |
| VACGL020 | 176 | — | “unknown, orthologous to TC10L[Tian |
| | | | tan]” |
| VACGL021 | 177 | C9L | ankyrin-like protein |
| VACGL023 | 178 | C8L | unknown |
| VACGL025 | 179 | C7L | host-range protein |
| VACGL026 | 180 | C6L | unknown |
| VACGL027 | 181 | C5L | unknown |
| VACGL028 | 182 | C4L | unknown |
| VACGL029 | 183 | C3L | secreted complement binding |
| VACGL030 | 184 | — | similar to putative C ORF A[VacCop] |
| VACGL031 | 185 | C2L | kelch-like protein |
| VACGL032 | 186 | C1L | unknown |
| VACGL033 | 187 | N1L | virokine |
| VACGL034 | 188 | N2L | alpha-amanitin target |
| VACGL035 | 189 | M1L | ankyrin-like protein |
| VACGL036 | 190 | M2L | unknown |
| VACGL037 | 191 | K1L | ankyrin-like protein |
| VACGL038 | 192 | K2L | serine protease inhibitor-like |
| VACGL041 | 193 | — | “hypothetical protein, orthologous to |
| | | | m0036R[Vaccinia]” |
| VACGL042 | 194 | K3L | interferon resistance protein |
| VACGL043 | 195 | K4L | phospholipase-D-like protein |
| VACGL044 | 196 | — | putative monoglyceride lipase[Vaccinia] |
| VACGL045 | 197 | K5L | putative monoglyceride lipase |
| VACGL046 | 198 | K6L | putative monoglyceride lipase |
| VACGL047 | 199 | K7R | unknown |
| VACGL049 | 200 | F1L | unknown |
| VACGL050 | 201 | F2L | dUTPase |
| VACGL051 | 202 | F3L | kelch-like protein |
| VACGL053 | 203 | F4L | ribonucleotide reductase small subunit |
| VACGL056 | 204 | F5L | unknown |
| VACGL057 | 205 | F6L | unknown |
| VACGL058 | 206 | F7L | unknown |
| VACGL059 | 207 | F8L | protein with iActA-like proline repeats |
| VACGL060 | 208 | F9L | S—S bond formation pathway protein |
| VACGL061 | 209 | F10L | ser/thr kinase |
| VACGL062 | 210 | — | similar to (VacCop) putative F ORF D |
| VACGL063 | 211 | F11L | unknown |
| VACGL064 | 212 | F12L | involved in plaque and EEV formation |
| VACGL066 | 213 | F13L | palmytilated EEV membrane protein |
| VACGL067 | 214 | F14L | unknown |
| VACGL068 | 215 | F14.5L | “F14.5L, hypothetical protein, |
| | | | orthologous to m0062L[Vaccinia]” |
| VACGL069 | 216 | F15L | unknown |
| VACGL070 | 217 | F16L | unknown |
| VACGL071 | 218 | F17R | putative DNA-binding phosphoprotein |
| VACGL073 | 219 | E1L | poly-A polymerase catalytic subunit |
| | | | VP55 |
| VACGL074 | 220 | E2L | unknown |
| VACGL075 | 221 | E3L | double-stranded RNA binding protein |
| VACGL076 | 222 | E4L | DNA-dependent RNA polymerase |
| | | | subunit rpo30 |
| VACGL077 | 223 | E5R | abundant component of virosome |
| VACGL079 | 224 | E6R | unknown |
| VACGL080 | 225 | E7R | “soluble, myristylprotein” |
| VACGL082 | 226 | E8R | membrane protein |
| VACGL084 | 227 | E9L | DNA polymerase |
| VACGL086 | 228 | E10R | sulfhydryl oxidase |
| VACGL087 | 229 | E11L | virion core protein |
| VACGL088 | 230 | O1L | unknown |
| VACGL090 | 231 | — | “unknown protein, orthologous to |
| | | | CPXV078A[Cowpox virus]” |
| VACGL091 | 232 | O2L | nonessential glutaredoxin |
| VACGL092 | 233 | I1L | DNA-binding core protein |
| VACGL093 | 234 | I2L | “hypothetical protein, orthologous to |
| | | | m0086L[Vaccinia]” |
| VACGL094 | 235 | I3L | ssDNA-binding phosphoprotein |
| VACGL095 | 236 | I4L | ribonucleotide reductase large subunit |
| VACGL098 | 237 | I5L | IMV protein VP13 |
| VACGL099 | 238 | I6L | unknown |
| VACGL100 | 239 | I7L | viral core cysteine proteinase |
| VACGL101 | 240 | I8R | “RNA-helicase, DExH-NPH-II” |
| VACGL102 | 241 | G1L | insulin metalloproteinase-like protein |
| VACGL103 | 242 | G3L | unknown |
| VACGL104 | 243 | G2R | late transcription elongation factor |
| VACGL105 | 244 | G4L | thioredoxin-like protein |
| VACGL106 | 245 | G5R | unknown |
| VACGL107 | 246 | G5.5R | DNA-dependent RNA polymerase |
| | | | subunit rpo7 |
| VACGL108 | 247 | G6R | unknown |
| VACGL109 | 248 | G7L | virion structural protein |
| VACGL111 | 249 | — | similar to (VacCop) putative G ORF B |
| VACGL112 | 250 | G8R | late gene transcription VLTF-1 |
| VACGL113 | 251 | G9R | myristylprotein |
| VACGL114 | 252 | L1R | IMV membrane protein |
| VACGL115 | 253 | L2R | unknown |
| VACGL116 | 254 | L3L | unknown |
| VACGL117 | 255 | L4R | core protein vp8 |
| VACGL118 | 256 | L5R | putative membrane protein |
| VACGL119 | 257 | J1R | virion protein |
| VACGL120 | 258 | J2R | thymidine kinase |
| VACGL121 | 259 | J2R | thymidine kinase |
| VACGL122 | 260 | J3R | multifunctional poly-A polymerase |
| | | | subunit |
| VACGL123 | 261 | J4R | DNA-dependent RNA polymerase |
| | | | subunit rpo22 |
| VACGL124 | 262 | J5L | late 16 kDa putative membrane protein |
| VACGL125 | 263 | J6R | DNA-dependent RNA polymerase |
| | | | subunit rpo147 |
| VACGL127 | 264 | H1L | tyr/ser protein phosphatase |
| VACGL128 | 265 | H2R | unknown |
| VACGL129 | 266 | H3L | IMV heparin binding surface protein |
| VACGL130 | 267 | H4L | RAP94 |
| VACGL131 | 268 | H5R | “morphogenesis-related, substrate of B1R |
| | | | kinase” |
| VACGL132 | 269 | H6R | topoisomerase type IB |
| VACGL133 | 270 | — | “unknown, orthologous to |
| | | | CPXV116[Cowpox virus]” |
| VACGL134 | 271 | H7R | unknown |
| VACGL135 | 272 | D1R | large subunit of mRNA capping enzyme |
| VACGL137 | 273 | D2L | virion core protein |
| VACGL139 | 274 | D3R | virion core protein |
| VACGL140 | 275 | D4R | uracil-DNA glycosylase |
| VACGL141 | 276 | — | similar to (VacCop) putative D ORF C |
| VACGL142 | 277 | D5R | NTPase interacts with A20R |
| VACGL145 | 278 | D6R | 70 kDa small subunit of early gene |
| | | | transcription factor VETF |
| VACGL147 | 279 | D7R | DNA-dependent RNA polymerase |
| | | | subunit rpo18 |
| VACGL148 | 280 | D8L | IMV membrane protein |
| VACGL149 | 281 | D9R | contains mutT-like motif of NTP- |
| | | | phosphohydrolase for DNA repair |
| VACGL150 | 282 | D10R | contains mutT-like motif of NTP- |
| | | | phosphohydrolase for DNA repair |
| VACGL151 | 283 | D11L | “ATPase, nucleoside triphosphate |
| | | | phosphohydrolase-I, NPH-I” |
| VACGL155 | 284 | D12L | small subunit of mRNA capping enzyme |
| VACGL157 | 285 | — | “unknown, orthologous to unknown |
| | | | protein[Tian tan]” |
| VACGL158 | 286 | D13L | rifampicin target |
| VACGL160 | 287 | A1L | late gene transcription factor VLTF-2 |
| VACGL161 | 288 | A2L | late gene transcription factor VLTF-3 |
| VACGL162 | 289 | A2.5L | S—S bond formation pathway |
| VACGL163 | 290 | A3L | p4b precursor of core protein 4b |
| VACGL165 | 291 | A4L | 39 kDa core protein |
| VACGL167 | 292 | A5R | DNA-dependent RNA polymerase |
| | | | subunit rpo19 |
| VACGL168 | 293 | A6L | unknown |
| VACGL169 | 294 | A7L | 82 kDa large subunit of early gene |
| | | | transcription factor VETF |
| VACGL172 | 295 | A8R | 32 kDa small subunit of transcription |
| | | | factor VITF-3 |
| VACGL173 | 296 | A9L | IMV membrane protein |
| VACGL174 | 297 | A10L | precursor p4a of core protein 4a |
| VACGL178 | 298 | A11R | unknown |
| VACGL179 | 299 | A12L | core protein |
| VACGL180 | 300 | A13L | IMV membrane protein |
| VACGL181 | 301 | A14L | phosphorylated IMV membrane protein |
| VACGL182 | 302 | A14.5L | nonessential hydrophobic IV amd IMV |
| | | | membrane protein[Vaccinia] |
| VACGL183 | 303 | A15L | unknown |
| VACGL184 | 304 | A16L | soluble myristylprotein |
| VACGL185 | 305 | A17L | IMV membrane protein |
| VACGL186 | 306 | A18R | DNA helicase |
| VACGL187 | 307 | A19L | unknown |
| VACGL188 | 308 | A21L | unknown |
| VACGL189 | 309 | A20R | viral DNA polymerase processivity factor |
| VACGL192 | 310 | A22R | palmitylprotein |
| VACGL193 | 311 | A23R | 45 kDa large subunit of intermediate gene |
| | | | transcription factor VITF-3 |
| VACGL194 | 312 | A24R | DNA-dependent RNA polymerase |
| | | | subunit rpo132 |
| VACGL196 | 313 | A25L | DNA-directed RNA polymerase |
| | | | subunit[Vaccinia] |
| VACGL197 | 314 | — | cowpox A-type inclusion protein |
| VACGL199 | 315 | — | cowpox A-type inclusion protein |
| VACGL201 | 316 | A26L | cowpox A-type inclusion protein |
| VACGL203 | 317 | A27L | IMV surface protein |
| VACGL204 | 318 | A28L | unknown |
| VACGL205 | 319 | A29L | DNA-dependent RNA polymerase rpo35 |
| VACGL206 | 320 | — | similar to (VacCop) putative A ORF K |
| VACGL207 | 321 | A30L | IMV protein |
| VACGL208 | 322 | A31R | unknown |
| VACGL209 | 323 | A32L | putative ATPase |
| VACGL211 | 324 | A33R | EEV membrane phosphoglycoprotein |
| VACGL212 | 325 | A34R | EEV glycoprotein |
| VACGL213 | 326 | — | similar to (VacCop) putative A ORF M |
| VACGL214 | 327 | A35R | unknown |
| VACGL215 | 328 | A36R | IEV transmembrane phosphoprotein |
| VACGL216 | 329 | A37R | unknown |
| VACGL218 | 330 | — | unknown |
| VACGL220 | 331 | A38L | CD47-like putative membrane protein |
| VACGL221 | 332 | A39R | similar to (VacCop) putative A39R |
| VACGL223 | 333 | A40R | C-type lectin-like type-II membrane |
| | | | protein |
| VACGL224 | 334 | A41L | secreted glycoprotein |
| VACGL225 | 335 | A42R | profilin-like protein |
| VACGL226 | 336 | A43R | putative type-I membrane glycoprotein |
| VACGL227 | 337 | 268 | “hypothetical protein, orthologous to |
| | | | m0215[Vaccinia]” |
| VACGL228 | 338 | A44L | hydroxysteroid dehydrogenase |
| VACGL229 | 339 | A45R | inactive Cu—Zn superoxide dismutase-like |
| | | | in virion |
| VACGL230 | 340 | A46R | Toll/IL1-receptor |
| VACGL232 | 341 | A47L | unknown |
| VACGL233 | 342 | — | “unknown, orthologs to unknown |
| | | | protein[monkeypox virus]” |
| VACGL234 | 343 | A48R | thymidylate kinase |
| VACGL235 | 344 | A49R | unknown |
| VACGL236 | 345 | A50R | DNA ligase |
| VACGL239 | 346 | A51R | unknown |
| VACGL240 | 347 | A52R | Toll/IL1-receptor |
| VACGL241 | 348 | A53R | Tumor necrosis factor receptor[Vaccinia] |
| VACGL243 | 349 | — | putative protein orthologous to |
| | | | CPXV192[Camelpox virus] |
| VACGL244 | 350 | A55R | kelch-like protein |
| VACGL245 | 351 | A56R | hemagglutinin |
| VACGL246 | 352 | A57R | guanylate kinase |
| VACGL247 | 353 | B1R | ser/thr kinase |
| VACGL249 | 354 | B2R | unknown |
| VACGL251 | 355 | — | similar to (VacCop) putative B ORF C |
| VACGL252 | 356 | B3R | unknown |
| VACGL253 | 357 | — | unknown[Vaccinia] |
| VACGL255 | 358 | B4R | ankyrin-like protein |
| VACGL256 | 359 | B5R | EEV type-I membrane glycoprotein |
| VACGL257 | 360 | B6R | ankyrin-like protein |
| VACGL259 | 361 | B7R | 21 kDa precursor protein |
| VACGL260 | 362 | B8R | soluble interferon-gamma receptor-like |
| | | | protein |
| VACGL261 | 363 | — | Potential protein orthologous to |
| | | | RPXV171[Rabbitpox virus] |
| VACGL262 | 364 | B9R | 6 kDa intracellular viral protein |
| VACGL263 | 365 | B10R | unknown |
| VACGL264 | 366 | B11R | unknown |
| VACGL265 | 367 | B12R | ser/thr protein kinase-like protein |
| VACGL266 | 368 | B13R | “SPI-2/CrmA inhibits Fas-mediated |
| | | | apoptosis, IL-1 convertase, lipoxygenase |
| | | | pathway” |
| VACGL267 | 369 | B14R | “SPI-2/CrmA inhibits Fas-mediated |
| | | | apoptosis, IL-1 convertase, lipoxygenase |
| | | | pathway” |
| VACGL268 | 370 | B15R | unknown |
| VACGL270 | 371 | B16R | IL-1-beta-inhibitor |
| VACGL272 | 372 | B17L | unknown |
| VACGL273 | 373 | B18R | ankyrin-like protein |
| VACGL274 | 374 | B19R | IFN-alpha/beta-receptor-like secreted |
| | | | glycoprotein |
| VACGL275 | 375 | B20R | similar to (VacCop) putative B20R |
| VACGL277 | 376 | — | interleukin-18-binding protein |
| VACGL278 | 377 | — | zinc finger-like protein |
| VACGL279 | 378 | — | zinc finger-like; apoptosis |
| VACGL280 | 379 | C10L | unknown |
| VACGL282 | 380 | C11R | secreted epidermal growth factor-like |
| | | | protein |
| VACGL283 | 381 | C12L | serine protease inhibitor-like SPI-1 |
| VACGL284 | 382 | B23R/C17L | similar to (VacCop) putative C17L |
| VACGL285 | 383 | B23R/C17L | similar to (VacCop) putative C17L |
| VACGL286 | 384 | B24R/C18L | similar to (VacCop) putative C18L |
| VACGL287 | 385 | B28R/C22L | TNF-alpha-receptor-like protein |
| VACGL288 | 386 | — | fragement of tumor necrosis factor |
| | | | receptor II[Cowpox] |
| VACGL289 | 387 | B29R/C23L | chemokine-binding protein |
| lacZ | 388 | — | E. coli beta-galactosidase |
| gusA | 389 | — | E. coli beta-glucuronidase |
| ruc-gfP | 390 | — | renilla luciferase-green fluorescent |
| | | | protein fusion |

[0309] With this array, it was possible to compare the expression of VACV transcripts in vivo in the responding xenograft tumor, GI-101A, and the two non-responding xenografts tumors, HT-29 (characterized by normal in vitro but delayed in vivo replication) and PC-3 (characterized by delayed in vitro but intermediate in vivo replication). In all cases, there was a correlation between Ruc-GFP transcript expression and the overall expression of VACV genes independent of cell line analyzed, suggesting that the exogenous construct accurately represented GLV-1h68 replication. Furthermore, although some variation in VACV gene expression was observed among cell lines or among individual experiments using the same cell line, a clear dichotomy was observed between replicating and non-replicating cases. The overall VACV transcriptional pattern correlated to viral titers observed in vivo (Table 9). For example, most GI-101A xenografts demonstrated replication with three out of four samples expressing VACV genes at day 7, and four out of four samples at days 21 and 42. In contrast, HT-29 and PC-3 displayed delayed replication in vivo with only a small proportion of xenografts displaying full VACV gene expression at day 21 (two out of four in either case). After 42 days the expression of VACV genes was turned on in all four PC-3 xenografts and in only one of four HT-29 xenografts, consistent with direct viral load analysis. These data suggest that delayed in vivo, but not complete lack of, replication is a predictor of in vivo outcome.

[0310] For the array analysis on the in vitro infected tumor cell samples, VACV gene expression analysis confirmed a lack of differences in the transcriptional pattern of in vitro replication between HT-29 and GI-101A with two out of three cell cultures demonstrating active viral replication in either case in the first 24 hours after infection. The transcriptional pattern associated with PC-3 replication in vitro at 24 hours was not tested by the array platform since it was clearly absent according to viral load and Ruc-GFP analysis.

[0311] The kinetics of VACV gene expression in xenografts were measured by a time-course analysis performed on BRB-Array tool based on a time threshold p-value <0.001 and a false discovery rate of 0.1. Differences in VACV gene expression between non-responding (HT-29 and PC-3) and responding xenografts (GI-101A) were observed 21 days after intravenous injection of GLV-1h68. At that time point, only three out of eight non responding xenografts (one HT-29 and two PC-3) demonstrated active replication compared with four out of four xenografts derived from GI-101A (Fisher test p-value=0.03). Consistent with these results, a Student's t test comparing the number of VACV genes differentially expressed between xenografts at day 21 or 42 with baseline conditions (uninfected xenografts or xenografts excised from mice infected only 24 hours prior) identified significant differences (multivariate permutation p-value <0.001) only in GI-101A xenografts at day 21, while significant differences were observed in PC-3 xenografts at day 42 only. Table 12 shows the number of VACV-genes differentially expressed between baseline and 21 or 42 days in the three exemplary xenografts (Student's t test cutoff <0.001, multivariate permutation test p-value is shown).

TABLE 12

| | | Probe # | Gene # | |
|---|---|---|---|---|
| Experimental | House keeping | 393 | 337 | Permutation Test |
| Groups | VACV | 308 | 219 | p-value |
| GI-101A | House keeping | 3 | 2 | n.s |
| 7 days | VACV | 0 | 0 | n.s |
| GI-101A | House keeping | 261 | 232 | <0.001 |
| 21 days | VACV | 307 | 219 | <0.001 |
| GI-101A | House keeping | 267 | 237 | <0.001 |
| 42 days | VACV | 299 | 216 | <0.001 |
| HT-29 | House keeping | 3 | 3 | n.s |
| 21 days | VACV | 0 | 0 | n.s |
| HT-29 | House keeping | 10 | 10 | n.s |
| 42 days | VACV | 0 | 0 | n.s |
| PC-3 | House keeping | 38 | 38 | n.s |
| 21 days | VACV | 0 | 0 | n.s |
| PC-3 | House keeping | 52 | 50 | n.s |
| 42 days | VACV | 201 | 195 | <0.001 |

n.s. = not significant

[0312] The number of genes differentially expressed in replicating tumors reflected almost completely the number of probes and annotations present in the array platform

[symbol]

and 308) respectively, demonstrating that GLV-1h68 replication is either absent or complete in xenografts. A near complete overlap of VACV probes or genes expressed at day 21 and 42 was observed in the GI-101A xenografts. A reverse behavior was observed in the pattern of expression of human house keeping genes represented in the VACV array platform; these genes were significantly down-regulated in permissive cell lines, suggesting a shut off of cellular metabolism in virally infected cells that correlated inversely with viral transcription as previously described (Guerra, S. et al. (2007) J. Virol. 81:8707-8721).

[0313] 2. Transcriptional Differences Between Responding Xenografts Versus Non-Responding Xenografts to Systemic GLV-1h68 Administration: Human Cancer Signatures

[0314] A time course analysis evaluating the in vivo effects of viral replication on the permissive GI-101A human xenografts was performed using a previously described custom-made 17.5 k human cDNA array platform (Panelli, M. C. et al. (2006) Genome Biol 8:R8. Four experimental groups were tested that included animals receiving systemic GLV-1h68 administration 1, 7, 21 and 42 days before xenograft excision; 4 animals were tested for each experimental group. As expected based on the analysis of viral replication in vivo, significant changes in the transcriptional profile of infected tumors occurred only 21 days after GLV-1h68 administration and increased at 42 days. Since the time course demonstrated that in permissive xenografts the most significant changes occurred only after 21 days, the analysis of xenografts representative of non-responding tumors was limited to days 21 and 42. It was previously observed that the use of species-specific cDNA arrays as well as oligo probes can distinguish the expression patterns in mixed cell populations in which human tissues (cancer cells) are infiltrated with host normal cells (Zhang, Q. et al. (2007) Cancer Res. 67:10038-10046). This is due to a lack or reduced cross-hybridization between non-related species was comparable to closely related ones, such as primate to primate comparisons. Although partial cross-hybridization may occur, this can be flagged and eliminated by applying an appropriate intensity signal cutoff. Since cDNA arrays contain probes of relatively large size (600 to 2,000 bases), to increase the specificity of the hybridization, the same material was tested on custom-made 36 kb oligo array platforms, constituting 70-base-length oligo-probes (Operon) as well as cDNA probes using identical statistical parameters. The results were concordant between platforms.

[0315] To test whether delayed replication affected the transcriptional program of cancer cell lines, the transcriptional profile of responding (GI-101A) and non-responding (HT-29) xenografts was compared. Comparisons were made between the transcriptional profiles of infected and non-infected GI-101A and HT-29 xenografts at days 21 and 42. HT-29 was selected among the non-responding tumor cell lines because of the different behavior observed in in vivo experiments compared to the responding GI-101A. An overview of the global differences among experimental conditions was provided by multiple dimensional scaling based on the complete data set of 36K oligo probes. This analysis demonstrated that infected GI-101A xenografts completely segregated in Euclidian space from non infected xenografts, while HT-29 xenografts clustered together whether or not they received GLV-1h68 treatment. Similar results were observed based on the cDNA-based array platform.

[0316] To test overall differences between xenografts from infected and non-infected animals, a Student's t test (cutoff p₂-value <0.001) comparing GI-101A infected xenografts to non-infected xenografts and HT-29 101A infected xenografts to non-infected xenografts was applied. Comparison of GI-101A xenografts identified 1,073 genes differentially expressed between infected and non-infected xenografts at the level of significance (permutation test p value=0). By contrast, only 9 genes were found to be differentially expressed by HT-29 xenografts excised from infected compared to non-infected animals at the same statistical stringency (permutation test non significant). Among the genes differentially expressed in the GI-101A xenografts excised from GLV-1h68 infected animals, the large majority were down-regulated, particularly, in xenografts excised at day 42 suggesting that, as observed in vitro, viral replication induces depression of cellular function. A smaller cluster of genes was specifically over-expressed by GI-101A xenografts from infected animals. Among these genes, allograft inflammatory factor-1 (AIF-1), tissue inhibitor of metalloproteinase 2 (TIMP-2) and the IL-2 receptor common γ chain were found to be strongly up regulated.

[0317] A multivariate analysis (F test, p-value cutoff <0.001) comparing the four groups at days 21 and 42 (HT-29 and GI-101A in infected and non-infected mice) identified 2,241 and 1,984 clones, respectively, that were differentially expressed among the four groups based on the oligo arrays. Comparison of the 17 k cDNA arrays similarly identified 1,467 cDNA clones representative of the four groups at day 42. In either platform, most of the differences in expression pattern were tumor cell specific and segregated the HT-29 xenografts from GI-101A xenografts independent of GLV-1h68 administration. However, a subgroup of genes was observed to be specific for GI-101A infected xenografts (exemplified using the cDNA array platform displaying 149 clones. The GLV-1h68 infection-specific signatures were enriched of genes associated with immune function (35 genes) with a significantly higher than expected frequency (1.88) according to Genontology assignment of biological processes. Among the genes up-regulated in the in GI-101A xenografts excised from GLV-1h68 infected mice, several were strongly associated with activation of innate immune mechanisms including the Toll-like receptor (TLR)-2, the interferon regulatory factor (IRF)-7, signal transducer and activator of T cell (STAT)-3 and tumor necrosis factor (TNF)-α. This enrichment was not as clearly observed in the oligo array based arrays, suggesting that these signatures could be potentially attributed to host infiltrating immune cells whose genes could cross-hybridize to the less stringent cDNA array probes.

[0318] 3. Transcriptional Differences Between Responding Xenografts Versus Non-Responding Xenografts to Systemic GLV-1h68 Administration: Mouse Host Signatures

[0319] To further define the host involvement in the oncolytic process, HT-29 and GI-101A xenografts were analyzed using a custom-made, whole genome mouse array platform. All four GI-101A xenografts excised at day 42 from infected mice were utilized, while only three of four xenograft were utilized for the human arrays described above due to degradation of human mRNA in one of the regressing xenografts. Gene expression was only significantly affected in GI-101A xenografts excised from GLV-1h68 infected mice (see Table 13). This modulation was particularly evident at day 42 when 768 genes were altered in expression in GI-101A xenografts excised from GLV-1h68 infected animals.

TABLE 13
Genes differentially expressed between xenografts excised from
GLV-1h68-infected vs non-infected animals
(Cut off p₂-value <0.001 (unpaired Student t test)
36k whole genome mouse array platform

| Day | Experimental Group | # genes | Permutation test |
|---|---|---|---|
| 21 | HT-29 | 0 | N.S. |
| 42 | HT-29 | 6 | N.S. |
| 21 | GI-101A | 88 | <0.01 |
| 42 | GI-101A | 768 | <0.001 |

[0320] A statistical overview of gene expression modulation of GI-101A xenografts from GLV-1h68 infected grafts gave an opposite picture compared with that obtained with the human arrays. Most mouse genes where up regulated in xenografts excised from infected animals suggesting that, while the metabolism of cancer cell was declining, the activation of host cells was actively enhanced. An F test was performed to compare xenografts at days 21 and 42. At day 21, 1,066 genes demarcated the differences among the four experimental groups. This number increased to 1,471 by day 42 (permutation test p-value=0 in either case).

[0321] Genes up-regulated in GI-101A xenografts excised from infected animals included several genes with immune effector function including several lymphokines, chemokines and interferon-stimulated genes (ISGs) (see Table 14, Il18 bp (SEQ ID NO:406), 1118 (SEQ ID NO:407), 1115 (SEQ ID NO: 124), Il10ra (SEQ ID NO:408), Cxcl11 (SEQ ID NO:409), Cxcl9 (SEQ ID NO:410), Cxcl12 (SEQ ID NO:411), Cc15 (SEQ ID NO:142), Cc19 (SEQ ID NO:46), Cc17 (SEQ ID NO:412), Ccl27 (SEQ ID NO:413), Igtp (SEQ ID NO:474), Ifi27 (SEQ ID NO:414), Ifi47 (SEQ ID NO:475), Iigp2 (SEQ ID NO:476)ⱼ Mx1 (SEQ ID NO:415), Ifi204 (SEQ ID NO:477), Irf1 (SEQ ID NO:416), Stat1 (SEQ ID NO:417), Ifit1 (SEQ ID NO:418), Iigp1 (SEQ ID NO:478), Ifnar2 (SEQ ID: NO 419), Irf5 (SEQ ID NO:420), Stat3 (SEQ ID NO:421), Ly6f (SEQ ID NO:479), Aif1 (SEQ ID NO:422), Ly6c (SEQ ID NO:480), Ripk1 (SEQ ID NO:423), Sell (SEQ ID NO:424), Tax1bp (SEQ ID NO:425), Ikbkap (SEQ ID NO:426), Ly6a (SEQ ID NO:481), Ct1a2b (SEQ ID NO:482), Arts1 (SEQ ID NO:427), Nkiras2 (SEQ ID NO:428), Ly96 (SEQ ID NO:429), Ly6e (SEQ ID NO:430), and Tlr2 (SEQ ID NO:431)).

[0322] Among the cytokines, IL-18 and the IL-18 binding protein appeared to play a prominent role, while IL-15 was also strongly up regulated. Several CXCR-3, CXCR4 and CCR5 ligands were up regulated among chemokines, suggesting a strong pro-inflammatory switch capable of recruiting activated natural killer cells. Among them, the expression of CXC-12/SDF-1 was previously reported to be associated with the rejection of metastatic melanoma during IL-2 therapy (Wang, E. et al. (2002) Cancer Res. 62:3581-3586). A large number of ISGs predominantly associated with interferon-alpha (IFN-α) function were also up regulated including IRF-1, also previously described in association with rejection of melanoma metastases during IL-2 based immunotherapy. ISGs were among the most up-regulated genes including interferon-γ-induced GTPase, whose expression was increased 48-fold in GI-101A tumors excised from GLV-1h68-infected animals compared with control xenografts. TLR-2, AIF-1 and STAT-3 were also found to be up-regulated according to the mouse array platform similarly to the findings in the human platform suggesting a cross hybridization of these genes likely expressed by host immune cells.

TABLE 14
Immune genes up-regulated in regressing GI-101A tumors
(F test p₂-value <0.001)

| | | | | | | |
|---|---|---|---|---|---|---|
| Gene | | | HT-29 | HT-29 | GI-101A | GI-101A |
| ID # | Symbol | Name | Control | GLV-1h68 | Control | GLV-1h68 |

Interleukins and Receptors

| | | | | | | |
|---|---|---|---|---|---|---|
| 16068 | Il18bp | interleukin 18 binding protein | 1.31 | 2.18 | 1.00 | 13.28 |
| 16173 | Il18 | interleukin 18 | 1.12 | 1.40 | 1.00 | 10.89 |
| 16168 | Il15 | interleukin 15 | 1.02 | 1.51 | 1.00 | 5.20 |
| 16154 | Il10ra | interleukin 10 receptor alpha | 0.74 | 0.90 | 1.00 | 3.51 |

Chemokines

| | | | | | | |
|---|---|---|---|---|---|---|
| | Cxcl11 | Cxcl11/I-TAC | 0.92 | 1.75 | 1.00 | 13.57 |
| 17329 | Cxcl9 | Cxcl9/Mig | 1.01 | 1.07 | 1.00 | 11.74 |
| 20315 | Cxcl12 | Cxcl12/SDF-1/PBSF | 0.41 | 0.58 | 1.00 | 5.23 |
| 20304 | Ccl5 | Ccl5/RANTES | 1.00 | 2.69 | 1.00 | 13.33 |
| 20308 | Ccl9 | Ccl9/MRP-2/CCF18/MIP-1γ | 1.56 | 3.14 | 1.00 | 12.03 |
| 20304 | Ccl5 | Ccl5/RANTES | 1.11 | 2.57 | 1.00 | 9.81 |
| 20306 | Ccl7 | Ccl7/MARC | 0.84 | 1.18 | 1.00 | 5.86 |
| 20301 | Ccl27 | Ccl27/ALP/CTACK/ILC/Eskine | 1.86 | 1.91 | 1.00 | 5.17 |
| 20308 | Ccl9 | Ccl9/MRP-2/CCF18/MIP-1γ | 1.26 | 1.42 | 1.00 | 4.04 |

ISGs

| | | | | | | |
|---|---|---|---|---|---|---|
| 16145 | Igtp | interferon gamma induced GTPase | 1.15 | 3.31 | 1.00 | 48.21 |
| 76933 | Ifi27 | interferon, alpha-inducible protein 27 | 0.76 | 0.91 | 1.00 | 12.84 |
| | Ifi47 | interferon gamma inducible protein 47 | 0.66 | 0.94 | 1.00 | 11.09 |
| | Iigp2 | interferon inducible GTPase 2 | 0.64 | 1.41 | 1.00 | 10.05 |
| 16145 | Igtp | interferon gamma induced GTPase | 0.70 | 1.28 | 1.00 | 9.70 |
| 17857 | Mx1 | myxovirus (influenza virus) resistance 1 | 0.62 | 1.46 | 1.00 | 9.46 |
| | Ifi204 | interferon activated gene 204 | 0.86 | 1.77 | 1.00 | 8.94 |
| 16362 | Irf1 | interferon regulatory factor 1 | 0.59 | 0.98 | 1.00 | 7.28 |
| 20846 | Stat1 | signal transducer and activator of transcription 1 | 0.57 | 0.81 | 1.00 | 6.84 |
| 20846 | Stat1 | signal transducer and activator of transcription 1 | 0.66 | 0.97 | 1.00 | 6.17 |
| 15957 | Ifit1 | interferon-induced protein with tetratricopeptide repeats 1 | 0.79 | 1.03 | 1.00 | 5.77 |
| 60440 | Iigp1 | interferon inducible GTPase 1 | 0.77 | 1.00 | 1.00 | 4.19 |
| 15976 | Ifnar2 | Interferon (alpha and beta) receptor 2 | 1.10 | 1.60 | 1.00 | 3.73 |
| | Irf5 | interferon regulatory factor 5 | 0.53 | 0.70 | 1.00 | 3.47 |
| 20848 | Stat3 | signal transducer and activator of transcription 3 | 1.16 | 1.17 | 1.00 | 2.55 |

Other

| | | | | | | |
|---|---|---|---|---|---|---|
| 17071 | Ly6f | Lymphocyte antigen 6 complex, locus F | 0.56 | 0.73 | 1.00 | 8.56 |
| 11629 | Aif1 | allograft inflammatory factor 1 | 0.90 | 1.33 | 1.00 | 8.46 |
| 17067 | Ly6c | Lymphocyte antigen 6 complex, locus C | 1.24 | 1.22 | 1.00 | 7.35 |
| | Ripk1 | receptor (TNFRSF)-interacting serine-threonine kinase 1 | 0.82 | 1.42 | 1.00 | 6.97 |
| 17067 | Ly6c | lymphocyte antigen 6 complex, locus C | 0.99 | 1.12 | 1.00 | 6.03 |
| 17071 | Ly6f | lymphocyte antigen 6 complex, locus F | 0.80 | 0.89 | 1.00 | 5.66 |
| 20343 | Sell | selectin, lymphocyte | 0.61 | 0.79 | 1.00 | 5.03 |
| 76281 | Tax1bp1 | Tax1 (human T-cell leukemia virus type I) binding protein 1 | 1.01 | 1.51 | 1.00 | 5.02 |
| 230233 | Ikbkap | inhibitor of kappa light polypeptide enhancer in B-cells | 0.81 | 0.93 | 1.00 | 4.55 |
| 110454 | Ly6a | lymphocyte antigen 6 complex, locus A | 0.96 | 0.98 | 1.00 | 4.13 |
| 13025 | Ctla2b | Cytotoxic T lymphocyte-associated protein 2 beta | 0.68 | 1.20 | 1.00 | 4.12 |
| | Arts1 | type 1 tumor necrosis factor receptor shedding aminopeptidase regulator | 0.73 | 1.31 | 1.00 | 3.87 |
| 71966 | Nkiras2 | NFKB inhibitor interacting Ras-like protein 2 | 1.07 | 1.27 | 1.00 | 3.80 |
| 17087 | Ly96 | lymphocyte antigen 96 | 1.13 | 1.43 | 1.00 | 3.77 |
| 17069 | Ly6e | Lymphocyte antigen 6 complex, locus E | 0.77 | 1.15 | 1.00 | 3.28 |
| 24088 | Tlr2 | toll-like receptor 2 | 0.25 | 0.36 | 1.00 | 1.60 |

[0323] 4. Delayed In Vitro Replication of GLV-1h68 can be Predicted by Specific Transcriptional Signatures Suggestive of Intrinsic Activation of Anti-Viral Mechanisms in the Non-Permissive Cancer Cell Lines

[0324] From the in vivo studies, it could be concluded that GLV-1h68 administration to human cancer xenograft-bearing mice resulted in a dichotomy of expression of viral genes that in turn resulted in differences in the expression patterns within the cancer cell lines with a strong reduction of cellular metabolism in presence of viral replication. These changes were also responsible for the activation of powerful innate immune mechanisms, suggesting that tumor eradication is at least in part due to the activation of immune effector mechanism. As described above, in vitro behavior of non-permissive cell lines was a strong predictor of in vivo behavior, where delayed replication of GLV-1h68 in vitro was consistently associated with lack of in vivo responsiveness of the corresponding xenografts. This in turn could decrease the in vivo ability of GLV-1h68 to control tumor growth either through oncolytic or immunological mechanisms. The expression profile of the different cancer cell lines in vitro in base line conditions (in the absence of GLV-1h68) and during the active phases of GLV-1h68 replication were examined. The following time points were compared for each cell line in the presence or absence of virus: 0, 3 and 12 hours.

[0325] GLV-1h68 infection induced several changes in gene expression that were time dependent and tightly correlated with the expression of VACV-genes. In particular, a shut off of several host cell genes was observed with time in accordance with previous studies (Guerra, S. et al. (2007) J Virol. 81:8707-8721). The most significant differences between the cell lines that allowed or inhibited early replication were noted in non-infected controls. Non-infected controls behaved similarly at the three in vitro culture time points (0, 3 and 12 hours) and no statistically significant differences could be identified among the three time points. Therefore, their transcriptional profile was analyzed together when comparing different cell lines. A class comparison was performed based on an unpaired Student's t test between non-permissive (MDA-231, NCI-H1229, SiHa, PC-3) and permissive (888-MEL, 1858-MEL, 1936-MEL, GI-101A, MIA PaCa-2, HT-29 and A549) cell lines; OVCAR-3 and PANC-1 were not included in the Student's t test analysis because of their intermediate behavior in allowing GLV-1h68 replication in culture. This analysis identified 1,736 genes that were differentially expressed between permissive and non-permissive cell lines at a p-value cut off of 0.01 (permutation test p-value=0). The most specific signatures were obtained for the constitutive expression of genes that characterized the non-permissive cell lines. It was observed that non-permissive cell lines expressed a significant number of interferon-stimulated genes (ISGs) and other immune regulatory genes based on Gene Ontology classification, while such genes were completely absent in the permissive cell lines (Table 15, IL6 (SEQ ID NO: 117), IL13RA1 (SEQ ID NO:432), IL8 (SEQ ID NO: 119), IL7R (SEQ ID NO:433), CCRL2 (SEQ ID NO:434), CCL5 (SEQ ID NO:142), IFIT1 (SEQ ID NO:418), EBI3 (SEQ ID NO:435), interferon-induced transmembrane protein 3 (SEQ ID NO:436), IFIT1 (SEQ ID NO:418), IFNGR2 (SEQ ID NO:437), IFITM2 (SEQ ID NO:438), MX1 (SEQ ID NO:415), STAT1 (SEQ ID NO:417), IFITM1 (SEQ ID NO:439), OASL (SEQ ID NO:440), IRF7 (SEQ ID NO:441), IRF1 (SEQ ID NO:442), NGFRAP1 (SEQ ID NO:443), TGFB1I1 (SEQ ID NO:444), TAX1BP3 (SEQ ID NO:445), BAX (SEQ ID NO:446), PTX3 (SEQ ID NO:447), BAG5 (SEQ ID NO:448), TIMP1 (SEQ ID NO:449), IER3 (SEQ ID NO:450), NFAT5 (SEQ ID NO:451), BAT5 (SEQ ID NO:452), TNFRSF9 (SEQ ID NO:453), LY6G6E (SEQ ID NO:454), CSF2 (SEQ ID NO:455), TNFSF10 (SEQ ID NO:456), CRLF2 (SEQ ID NO:457), LTB4R (SEQ ID NO:458), B2M (SEQ ID NO:459), GBP2 (SEQ ID NO:460), PBX4 (SEQ ID NO:461), NFKBIA (SEQ ID NO:462), HLA-C (SEQ ID NO:463), HLA-H (SEQ ID NO:464), HLA-G (SEQ ID NO:465), BCL6 (SEQ ID NO:466), HLA-F (SEQ ID NO:467), HLA-B (SEQ ID NO:468), HLA CLASS 1 HISTOCOMPATIBILITY ANTIGEN, ALPHA CHAIN F (SEQ ID NO:469), BAG3 (SEQ ID NO:470), HLA-DMA (SEQ ID NO:471), TRBC1 (SEQ ID NO:472), HLA-DRB4 (SEQ ID NO:473)).

[0326] Thus, it was concluded that non-permissive cell lines delay viral replication during the initial 24 hours through a constitutive activation of innate immune responses. In particular, genes associated with the initiation of anti-viral immune responses were observed to be constitutively expressed, including MX1, NFκBIA, STAT-1, IL-6, CXCL-8 (IL-8), CCL5 (RANTES), and several interferon regulatory factors (IRFs) including IRF-1 and IRF-7 while IRF-4, a classic inhibitor of TLR signaling and pro-inflammatory cytokine production downstream of MyD88 was the only ISG relatively under-expressed by non-permissive cells compared to permissive cells. Since GLV-1h68 replication in vitro is only dependent upon the interaction between the virus and the host cell without the participation of any immune mechanisms, the intracellular immune mechanism or paracrine cross talk among cancer cells may be sufficient to limit the ability of GLV-1h68 to replicate during the first 24 hours.

TABLE 15
Immune genes up-regulated in non-permissive tumors
(F test p₂-value <0.001)

| | | | | |
|---|---|---|---|---|
| Gene | | | Non-permissive cells | Permissive cells |
| ID # | Symbol | Name | Control | Control |

Interleukins and Receptors

| | | | | |
|---|---|---|---|---|
| 3569 | IL6 | interleukin 6 (interferon, beta 2) | 2.23 | 0.64 |
| 3597 | IL13RA1 | interleukin 13 receptor, alpha 1 | 2.02 | 0.99 |
| 3576 | IL8 | interleukin 8 | 0.27 | 0.06 |
| 3575 | IL7R | PREDICTED: interleukin 7 receptor | 0.09 | 0.04 |

Chemokines

| | | | | |
|---|---|---|---|---|
| 9034 | CCRL2 | chemokine (C-C motif) receptor-like 2 | 1.15 | 0.68 |
| 6352 | CCL5 | chemokine (C-C motif) ligand 5 | 0.10 | 0.06 |

ISGs

| | | | | |
|---|---|---|---|---|
| 3434 | IFIT1 | interferon-induced protein with tetratricopeptide repeats 1 | 4.76 | 0.69 |
| 10148 | EBI3 | Epstein-Barr virus induced gene 3 | 1.93 | 1.20 |
| | | LOC144383-PREDICTED: similar to Interferon-induced | 1.74 | 0.39 |
| | | transmembrane protein 3 | | |
| 3460 | IFNGR2 | interferon gamma receptor 2 (interferon gamma transducer 1) | 1.35 | 0.86 |
| 10581 | IFITM2 | interferon induced transmembrane protein 2 | 1.26 | 0.47 |
| 10581 | IFITM2 | interferon induced transmembrane protein 2 | 1.18 | 0.25 |
| 4599 | MX1 | myxovirus (influenza virus) resistance 1, interferon-inducible | 0.76 | 0.24 |
| | | protein p78 | | |
| 6772 | STAT1 | signal transducer and activator of transcription 1 | 0.65 | 0.22 |
| | IFITM1 | interferon induced transmembrane protein 1 | 0.62 | 0.04 |
| 8638 | OASL | 2′-5′-oligoadenylate synthetase-like | 0.50 | 0.23 |
| 3665 | IRF7 | interferon regulatory factor 7 | 0.35 | 0.14 |
| 3659 | IRF1 | interferon regulatory factor 1 | 0.31 | 0.19 |

Other

| | | | | |
|---|---|---|---|---|
| 27018 | NGFRAP1 | nerve growth factor receptor (TNFRSF16) associated protein 1 | 6.74 | 2.22 |
| 7041 | TGFB1I1 | transforming growth factor beta 1 induced transcript 1 | 3.46 | 1.39 |
| 30851 | TAX1BP3 | Tax1 (human T-cell leukemia virus type I) binding protein 3 | 3.16 | 1.23 |
| 581 | BAX | BCL2-associated X protein | 3.14 | 1.75 |
| 5806 | PTX3 | pentraxin-related gene, rapidly induced by IL-1 beta | 3.10 | 0.98 |
| 9529 | BAG5 | BCL2-associated athanogene 5 | 2.67 | 1.31 |
| 7076 | TIMP1 | TIMP metallopeptidase inhibitor 1 | 2.02 | 0.43 |
| 8870 | IER3 | immediate early response 3 | 2.00 | 0.84 |
| 10725 | NFAT5 | nuclear factor of activated T-cells 5, tonicity-responsive | 1.92 | 1.08 |
| 7920 | BAT5 | HLA-B associated transcript 5 | 1.75 | 1.03 |
| 3604 | TNFRSF9 | tumor necrosis factor receptor superfamily, member 9 | 1.65 | 0.80 |
| | LY6G6E | lymphocyte antigen 6 complex, locus G6E | 1.56 | 0.60 |
| 1437 | CSF2 | colony stimulating factor 2 (granulocyte-macrophage) | 1.49 | 0.77 |
| 8743 | TNFSF10 | tumor necrosis factor (ligand) superfamily, member 10 | 1.24 | 0.42 |
| 64109 | CRLF2 | cytokine receptor-like factor 2 | 0.97 | 0.70 |
| 1241 | LTB4R | leukotriene B4 receptor | 0.87 | 0.25 |
| | B2M | beta-2-microglobulin | 0.84 | 0.50 |
| 2634 | GBP2 | guanylate binding protein 2, interferon-inducible | 0.80 | 0.46 |
| 80714 | PBX4 | pre-B-cell leukemia homeobox 4 | 0.79 | 0.37 |
| 4792 | NFKBIA | nuclear factor of kappa light polypeptide gene enhancer in | 0.75 | 0.14 |
| | | B-cells inhibitor, alpha | | |
| 4792 | NFKBIA | nuclear factor of kappa light polypeptide gene enhancer in | 0.74 | 0.15 |
| | | B-cells inhibitor, alpha | | |
| | B2M | beta-2-microglobulin | 0.70 | 0.08 |
| 3107 | HLA-C | major histocompatibility complex, class I, C | 0.63 | 0.19 |
| | B2M | beta-2-microglobulin | 0.61 | 0.09 |
| 3136 | HLA-H | Major histocompatibility complex, class I, H | 0.57 | 0.26 |
| 3135 | HLA-G | HLA-G histocompatibility antigen, class I, G | 0.52 | 0.35 |
| | BCL6 | B-cell CLL/lymphoma 6 (zinc finger protein 51) | 0.48 | 0.17 |
| 3135 | HLA-G | HLA-G histocompatibility antigen, class I, G | 0.36 | 0.09 |
| 3134 | HLA-F | Major histocompatibility complex, class I, F | 0.35 | 0.16 |
| 3106 | HLA-B | major histocompatibility complex, class I, B | 0.28 | 0.14 |
| | | HLA CLASS I HISTOCOMPATIBILITY ANTIGEN, ALPHA | | |
| | | CHAIN F PRECURSOR (HL | 0.28 | 0.11 |
| | BAG3 | BCL2-associated athanogene 3 | 0.23 | 0.15 |
| 3108 | HLA-DMA | major histocompatibility complex, class II, DM alpha | 0.12 | 0.04 |
| 28639 | TRBC1 | T cell receptor beta constant 1 | 0.08 | 0.03 |
| 3126 | HLA-DRB4 | major histocompatibility complex, class II, DR beta 4 | 0.08 | 0.04 |

### Example 7

### Identification of Differentially Expressed Host Proteins in Hosts Bearing PANC-1 Xenograft Tumors, which Respond Favorably to Viral Therapy

[0327] To identify host proteins which are differentially expressed in hosts that respond favorably to viral therapy, PANC-1 tumor cells (human pancreatic ductal carcinoma cells) were implanted subcutaneously into nude mice (male or female). Once the tumors reached a desired size (approximately 200-400 mm³), the mice were injected intravenously with 5×10⁶ pfu/100 μl PBS/mouse of vaccinia virus GLV-1h68. Mice were sacrificed at 21 days and 42 days post-injection. Tumors were excised and prepared in Tris buffer. Protein expression profiles were determined by Rules-Based Medicine, Inc. using the RodentMAP™ multi-analyte profile immunoassay. The assay measure mouse protein levels in the extracted tumor samples. Table 16 shows the fold change in the host protein expression levels for tumors injected with GLV-1h68 (treated) and non-injected control tumors (untreated) at 21 days and 42 days post-injection (n=2). The data in Table 16 is expressed as Treated/Untreated and Untreated/Treated.

TABLE 16
Fold Change in Host Protein Expression Levels Between GLV-1h68 treated and
untreated PANC-1 human pancreatic xenograft tumors

| | Fold change in protein level | | | |
|---|---|---|---|---|
| | Treated/ | | Untreated/ | |
| | Untreated | | Treated | |
| Mouse Protein (expressed by host) | Day 21 | Day 42 | Day 21 | Day 42 |
| Apo A1 (Apolipoprotein A1) | 6.87 | 6.77 | 0.15 | 0.15 |
| CD40 | 1.56 | 1.90 | 0.64 | 0.53 |
| CD40 Ligand | 1.89 | 2.12 | 0.53 | 0.47 |
| CRP (C Reactive Protein) | 3.98 | 3.29 | 0.25 | 0.30 |
| EGF (Epidermal Growth Factor) | 0.40 | 1.60 | 2.53 | 0.62 |
| Endothelin-1 | 0.68 | 1.39 | 1.48 | 0.72 |
| Eotaxin | 7.44 | 5.56 | 0.13 | 0.18 |
| Factor VII | 1.26 | 0.98 | 0.80 | 1.02 |
| FGF-9 (Fibroblast Growth Factor-9) | 1.46 | 1.15 | 0.69 | 0.87 |
| FGF-basic (Fibroblast Growth Factor-basic) | 1.89 | 0.35 | 0.53 | 2.88 |
| Fibrinogen | 5.67 | 1.36 | 0.18 | 0.73 |
| GCP-2 (Granulocyte Chemotactic Protein-2) | 5.49 | 3.69 | 0.18 | 0.27 |
| GM-CSF (Granulocyte Macrophage-Colony | 0.49 | 1.63 | 2.03 | 0.61 |
| Stimulating Factor) | | | | |
| GST-alpha (Glutathione S-Transferase alpha) | n/a | n/a | n/a | n/a |
| Haptoglobin | 1.87 | 1.53 | 0.53 | 0.65 |
| IFN-gamma (Interferon-gamma) | 2.20 | 1.25 | 0.45 | 0.80 |
| IgA (Immunoglobulin A) | 1.57 | 0.62 | 0.64 | 1.62 |
| IL-10 (Interleukin-10) | 1.89 | 1.86 | 0.53 | 0.54 |
| IL-11 (Interleukin-11) | 6.02 | 4.06 | 0.17 | 0.25 |
| IL-12p70 (Interleukin-12p70) | 1.70 | 1.50 | 0.59 | 0.67 |
| IL-17 (Interleukin-17) | 2.19 | 1.93 | 0.46 | 0.52 |
| IL-18 (Interleukin-18) | 14.10 | 33.98 | 0.07 | 0.03 |
| IL-1 alpha (Interleukin-1 alpha) | 0.58 | 1.65 | 1.72 | 0.61 |
| IL-1 beta (Interleukin-1 beta) | 0.33 | 0.91 | 3.06 | 1.10 |
| IL-2 (Interleukin-2) | 1.42 | 1.38 | 0.70 | 0.73 |
| IL-3 (Interleukin-3) | 1.51 | 1.23 | 0.66 | 0.81 |
| IL-4 (Interleukin-4) | 1.49 | 1.27 | 0.67 | 0.79 |
| IL-5 (Interleukin-5) | 0.85 | 1.21 | 1.17 | 0.82 |
| IL-6 (Interleukin-6) | 4.08 | 7.82 | 0.25 | 0.13 |
| IL-7 (Interleukin-7) | 1.03 | 1.22 | 0.97 | 0.82 |
| IP-10 (Inducible Protein-10) | 10.48 | 11.24 | 0.10 | 0.09 |
| KC/GRO alpha (Melanoma Growth Stimulatory | 1.93 | 3.66 | 0.52 | 0.27 |
| Activity Protein) | | | | |
| LIF (Leukemia Inhibitory Factor) | 1.47 | 0.96 | 0.68 | 1.04 |
| Lymphotactin | 0.34 | 0.55 | 2.93 | 1.83 |
| MCP-1 (Monocyte Chemoattractant Protein-1) | 14.02 | 21.80 | 0.07 | 0.05 |
| MCP-3 (Monocyte Chemoattractant Protein-3) | 10.59 | 12.23 | 0.09 | 0.08 |
| MCP-5 (Monocyte Chemoattractant Protein-5) | 25.59 | 39.05 | 0.04 | 0.03 |
| M-CSF (Macrophage-Colony Stimulating | 2.20 | 4.06 | 0.45 | 0.25 |
| Factor) | | | | |
| MDC (Macrophage-Derived Chemokine) | 0.68 | 1.59 | 1.46 | 0.63 |
| MIP-1 alpha (Macrophage Inflammatory | 0.55 | 0.54 | 1.80 | 1.85 |
| Protein-1 alpha) | | | | |
| MIP-1 beta (Macrophage Inflammatory Protein- | 0.35 | 0.46 | 2.89 | 2.17 |
| 1 beta) | | | | |
| MIP-1gamma (Macrophage Inflammatory | 0.10 | 0.08 | 9.70 | 13.11 |
| Protein-1gamma) | | | | |
| MIP-2 (Macrophage Inflammatory Protein-2) | 4.82 | 3.59 | 0.21 | 0.28 |
| MIP-3 beta (Macrophage Inflammatory Protein- | 0.35 | 0.99 | 2.89 | 1.01 |
| 3 beta) | | | | |
| MMP-9 (Matrix Metalloproteinase-9) | 10.70 | 6.38 | 0.09 | 0.16 |
| MPO (Myeloperoxidase) | 5.62 | 2.65 | 0.18 | 0.38 |
| Myoglobin | — | — | — | — |
| OSM (Oncostatin M) | 1.13 | 1.31 | 0.89 | 0.77 |
| RANTES (Regulation Upon Activation, Normal | 0.23 | 0.13 | 4.41 | 7.45 |
| T-Cell Expressed and Secreted) | | | | |
| SAP (Serum Amyloid P) | 2.33 | 1.90 | 0.43 | 0.53 |
| SCF (Stem Cell Factor) | 1.33 | 1.62 | 0.75 | 0.62 |
| SGOT (Serum Glutamic-Oxaloacetic | 1.18 | 0.82 | 0.85 | 1.22 |
| Transaminase) | | | | |
| TIMP-1 (Tissue Inhibitor of Metalloproteinase | 14.26 | 13.80 | 0.07 | 0.07 |
| Type-1) | | | | |
| Tissue Factor | 2.11 | 1.20 | 0.47 | 0.83 |
| TNF-alpha (Tumor Necrosis Factor-alpha) | 1.34 | 1.88 | 0.74 | 0.53 |
| TPO (Thrombopoietin) | 2.22 | 2.07 | 0.45 | 0.48 |
| VCAM-1 (Vascular Cell Adhesion Molecule-1) | 0.96 | 2.00 | 1.05 | 0.50 |
| VEGF (Vascular Endothelial Cell Growth | 1.37 | 0.73 | 0.73 | 1.37 |
| Factor) | | | | |
| vWF (von Willebrand Factor) | 2.28 | 1.76 | 0.44 | 0.57 |

### Example 8

### Identification of Differentially Expressed Host Proteins in Hosts Bearing Xenograft Tumors, which Respond Favorably (PANC-1) or Poorly (HT29) to Viral Therapy

[0328] To identify host proteins which are differentially expressed in hosts having virus-treated tumors derived from cells known to respond favorably or cells known to respond poorly to viral therapy, PANC-1 tumor cells or HT29 tumor cells were implanted subcutaneously into nude mice (male or female). PANC-1 is a human pancreatic ductal carcinoma which responds favorably to viral therapy; HT29 is a human colorectal adenocarcinoma which responds poorly to viral therapy. Once the tumors reached a desired size (approximately 200-400 mm³), the mice were injected intravenously with 5×10⁶ pfu/100 μl PBS/mouse of vaccinia virus GLV-1h68. Mice were sacrificed and the tumors were excised and prepared in Tris buffer. Host protein profiles were determined by Rules-Based Medicine, Inc. using the RodentMAP™ multi-analyte profile immunoassay for tumors injected with GLV-1h68 (treated), and non-injected control tumors (untreated). The assay measures mouse protein levels in the extracted tumor samples. Table 17 shows the fold change in the host protein expression levels between GLV-1h68 treated and untreated tumor samples for tumors derived from either PANC-1 cells or HT29 cells. The data in Table 17 is expressed as either Untreated/Treated or Treated/Untreated for each tumor type. Table 18 shows the fold difference in protein expression levels between tumors derived from PANC-1 cells versus HT29 cells in GLV-1h68 (treated), or non-injected (untreated) tumors. The data in Table 18 is expressed as either PANC-1/HT29 or HT29/PANC-1 for either the treated or untreated tumor samples.

TABLE 17
Fold Change in Host Protein Expression Levels Between GLV-1h68 treated
and untreated PANC-1 human pancreatic and HT29 human colorectal
carcinoma xenograft tumors

| | Fold change in protein levels | | | |
|---|---|---|---|---|
| | Untreated/ | | Treated/ | |
| | Treated | | Untreated | |
| Mouse Protein (expressed by host) | PANC-1 | HT29 | PANC-1 | HT29 |
| Apo A1 (Apolipoprotein A1) | 0.2 | 0.8 | 5.2 | 1.2 |
| CD40 | 1.1 | 0.5 | 0.9 | 2.0 |
| CD40 Ligand | 1.6 | — | 0.6 | — |
| CRP (C Reactive Protein) | 0.2 | 1.0 | 4.8 | 1.0 |
| EGF (Epidermal Growth Factor) | 4.9 | 0.4 | 0.2 | 2.6 |
| Endothelin-1 | 2.7 | 0.8 | 0.4 | 1.2 |
| Eotaxin | 0.3 | 0.7 | 2.9 | 1.5 |
| Factor VII | 1.3 | 1.0 | 0.8 | 1.0 |
| FGF-9 (Fibroblast Growth Factor-9) | 0.8 | 1.0 | 1.2 | 1.0 |
| FGF-basic (Fibroblast Growth Factor-basic) | 0.5 | 0.7 | 2.0 | 1.4 |
| Fibrinogen | 0.2 | 2.8 | 4.8 | 0.4 |
| GCP-2 (Granulocyte Chemotactic Protein-2) | 0.4 | 1.3 | 2.8 | 0.8 |
| GM-CSF (Granulocyte Macrophage-Colony | 6.9 | 0.2 | 0.1 | 4.3 |
| Stimulating Factor) | | | | |
| GST-alpha (Glutathione S-Transferase alpha) | — | — | — | — |
| Haptoglobin | 0.6 | 0.9 | 1.6 | 1.1 |
| IFN-gamma (Interferon-gamma) | 1.2 | 0.6 | 0.8 | 1.6 |
| IgA (Immunoglobulin A) | 0.6 | 1.7 | 1.8 | 0.6 |
| IL-10 (Interleukin-10) | 0.8 | 1.0 | 1.2 | 1.0 |
| IL-11 (Interleukin-11) | 0.2 | 1.2 | 6.2 | 0.9 |
| IL-12p70 (Interleukin-12p70) | 0.9 | 1.1 | 1.1 | 0.9 |
| IL-17 (Interleukin-17) | 0.7 | 1.0 | 1.4 | 1.0 |
| IL-18 (Interleukin-18) | 0.1 | 0.4 | 13.9 | 2.3 |
| IL-1 alpha (Interleukin-1 alpha) | 3.7 | 2.2 | 0.3 | 0.5 |
| IL-1 beta (Interleukin-1 beta) | 17.0 | 2.2 | 0.1 | 0.5 |
| IL-2 (Interleukin-2) | 1.1 | 0.6 | 0.9 | 1.6 |
| IL-3 (Interleukin-3) | 1.0 | 0.7 | 1.0 | 1.4 |
| IL-4 (Interleukin-4) | 1.0 | 0.9 | 1.1 | 1.1 |
| IL-5 (Interleukin-5) | 3.6 | 3.5 | 0.3 | 0.3 |
| IL-6 (Interleukin-6) | 0.4 | 0.9 | 2.6 | 1.2 |
| IL-7 (Interleukin-7) | 1.6 | 1.4 | 0.6 | 0.7 |
| IP-10 (Inducible Protein-10) | 0.8 | 0.2 | 1.3 | 4.5 |
| KC/GRO alpha (Melanoma Growth Stimulatory | 2.2 | 1.3 | 0.5 | 0.8 |
| Activity Protein) | | | | |
| LIF (Leukemia Inhibitory Factor) | 1.1 | 1.3 | 0.9 | 0.8 |
| Lymphotactin | 5.4 | 0.7 | 0.2 | 1.4 |
| MCP-1 (Monocyte Chemoattractant Protein-1) | 0.2 | 1.5 | 5.7 | 0.7 |
| MCP-3 (Monocyte Chemoattractant Protein-3) | 0.5 | 0.8 | 2.0 | 1.3 |
| MCP-5 (Monocyte Chemoattractant Protein-5) | 0.1 | 0.5 | 8.9 | 2.0 |
| M-CSF (Macrophage-Colony Stimulating | 0.9 | 1.0 | 1.1 | 1.0 |
| Factor) | | | | |
| MDC (Macrophage-Derived Chemokine) | 2.1 | 1.2 | 0.5 | 0.8 |
| MIP-1 alpha (Macrophage Inflammatory | 2.2 | 1.4 | 0.5 | 0.7 |
| Protein-1 alpha) | | | | |
| MIP-1 beta (Macrophage Inflammatory | 2.0 | 2.8 | 0.5 | 0.4 |
| Protein-1 beta) | | | | |
| MIP-1gamma (Macrophage Inflammatory | 14.0 | 11.7 | 0.1 | 0.1 |
| Protein-1gamma) | | | | |
| MIP-2 (Macrophage Inflammatory Protein-2) | 0.6 | 1.0 | 1.5 | 1.0 |
| MIP-3 beta (Macrophage Inflammatory | 2.9 | 1.7 | 0.3 | 0.6 |
| Protein-3 beta) | | | | |
| MMP-9 (Matrix Metalloproteinase-9) | 0.3 | 1.4 | 3.2 | 0.7 |
| MPO (Myeloperoxidase) | 0.2 | 1.5 | 5.2 | 0.7 |
| Myoglobin | — | — | — | — |
| OSM (Oncostatin M) | 1.6 | 1.4 | 0.6 | 0.7 |
| RANTES (Regulation Upon Activation, Normal | 3.3 | 0.7 | 0.3 | 1.5 |
| T-Cell Expressed and Secreted) | | | | |
| SAP (Serum Amyloid P) | 0.5 | 1.2 | 2.1 | 0.8 |
| SCF (Stem Cell Factor) | 1.1 | 1.0 | 0.9 | 1.0 |
| SGOT (Serum Glutamic-Oxaloacetic | 0.7 | 1.0 | 1.3 | 1.0 |
| Transaminase) | | | | |
| TIMP-1 (Tissue Inhibitor of Metalloproteinase | 0.2 | 1.6 | 5.0 | 0.6 |
| Type-1) | | | | |
| Tissue Factor | 0.4 | 0.9 | 2.3 | 1.2 |
| TNF-alpha (Tumor Necrosis Factor-alpha) | 1.5 | 1.3 | 0.7 | 0.8 |
| TPO (Thrombopoietin) | 1.1 | 1.5 | 0.9 | 0.7 |
| VCAM-1 (Vascular Cell Adhesion Molecule-1) | 1.4 | 0.9 | 0.7 | 1.2 |
| VEGF (Vascular Endothelial Cell Growth | 2.5 | 1.4 | 0.4 | 0.7 |
| Factor) | | | | |
| vWF (von Willebrand Factor) | 0.6 | 1.2 | 1.6 | 0.8 |

TABLE 18
Fold Difference in Host Protein Expression Levels Between GLV-1h68 treated
and untreated PANC-1 human pancreatic and HT29 human colorectal
carcinoma xenograft tumors

| | Fold difference in protein levels | | | |
|---|---|---|---|---|
| | Treated | | Untreated | |
| | PANC-1/ | | PANC-1/ | HT29/ |
| Mouse Protein (expressed by host) | HT29 | HT29/PANC-1 | HT29 | PANC-1 |
| Apo A1 (Apolipoprotein A1) | 0.3 | 3.9 | 0.1 | 17.0 |
| CD40 | 2.2 | 0.5 | 4.9 | 0.2 |
| CD40 Ligand | — | — | 1.0 | 1.0 |
| CRP (C Reactive Protein) | 0.6 | 1.7 | 0.1 | 8.4 |
| EGF (Epidermal Growth Factor) | 0.0 | 135.9 | 0.1 | 10.7 |
| Endothelin-1 | 0.5 | 2.1 | 1.6 | 0.6 |
| Eotaxin | 1.0 | 1.0 | 0.5 | 1.9 |
| Factor VII | 1.0 | 1.0 | 1.3 | 0.8 |
| FGF-9 (Fibroblast Growth Factor-9) | 0.4 | 2.5 | 0.3 | 2.9 |
| FGF-basic (Fibroblast Growth Factor-basic) | 0.6 | 1.7 | 0.4 | 2.4 |
| Fibrinogen | 1.7 | 0.6 | 0.1 | 8.0 |
| GCP-2 (Granulocyte Chemotactic Protein-2) | 2.2 | 0.5 | 0.6 | 1.7 |
| GM-CSF (Granulocyte Macrophage-Colony | 0.7 | 1.4 | 21.4 | 0.0 |
| Stimulating Factor) | | | | |
| GST-alpha (Glutathione S-Transferase alpha) | — | — | — | — |
| Haptoglobin | 0.7 | 1.4 | 0.5 | 2.0 |
| IFN-gamma (Interferon-gamma) | 1.5 | 0.7 | 2.8 | 0.4 |
| IgA (Immunoglobulin A) | 0.8 | 1.3 | 0.3 | 4.0 |
| IL-10 (Interleukin-10) | 1.8 | 0.6 | 1.5 | 0.7 |
| IL-11 (Interleukin-11) | 4.2 | 0.2 | 0.6 | 1.7 |
| IL-12p70 (Interleukin-12p70) | 1.6 | 0.6 | 1.3 | 0.8 |
| IL-17 (Interleukin-17) | 1.7 | 0.6 | 1.3 | 0.8 |
| IL-18 (Interleukin-18) | 11.8 | 0.1 | 1.9 | 0.5 |
| IL-1 alpha (Interleukin-1 alpha) | 2.5 | 0.4 | 4.2 | 0.2 |
| IL-1 beta (Interleukin-1 beta) | 1.2 | 0.9 | 8.9 | 0.1 |
| IL-2 (Interleukin-2) | 0.7 | 1.4 | 1.3 | 0.8 |
| IL-3 (Interleukin-3) | 1.2 | 0.9 | 1.7 | 0.6 |
| IL-4 (Interleukin-4) | 1.2 | 0.8 | 1.3 | 0.8 |
| IL-5 (Interleukin-5) | 1.0 | 1.0 | 1.1 | 0.9 |
| IL-6 (Interleukin-6) | 3.9 | 0.3 | 1.7 | 0.6 |
| IL-7 (Interleukin-7) | 1.7 | 0.6 | 1.9 | 0.5 |
| IP-10 (Inducible Protein-10) | 2.5 | 0.4 | 9.1 | 0.1 |
| KC/GRO alpha (Melanoma Growth Stimulatory | 0.2 | 5.3 | 0.3 | 3.1 |
| Activity Protein) | | | | |
| LIF (Leukemia Inhibitory Factor) | 0.4 | 2.5 | 0.3 | 3.1 |
| Lymphotactin | 4.3 | 0.2 | 31.4 | 0.0 |
| MCP-1 (Monocyte Chemoattractant Protein-1) | 17.5 | 0.1 | 2.0 | 0.5 |
| MCP-3 (Monocyte Chemoattractant Protein-3) | 2.1 | 0.5 | 1.4 | 0.7 |
| MCP-5 (Monocyte Chemoattractant Protein-5) | 2.6 | 0.4 | 0.6 | 1.7 |
| M-CSF (Macrophage-Colony Stimulating | 2.7 | 0.4 | 2.5 | 0.4 |
| Factor) | | | | |
| MDC (Macrophage-Derived Chemokine) | 1.3 | 0.8 | 2.2 | 0.5 |
| MIP-1 alpha (Macrophage Inflammatory | 1.0 | 1.0 | 1.6 | 0.6 |
| Protein-1 alpha) | | | | |
| MIP-1 beta (Macrophage Inflammatory | 3.5 | 0.3 | 2.6 | 0.4 |
| Protein-1 beta) | | | | |
| MIP-1gamma (Macrophage Inflammatory | 1.3 | 0.8 | 1.6 | 0.6 |
| Protein-1gamma) | | | | |
| MIP-2 (Macrophage Inflammatory Protein-2) | 2.0 | 0.5 | 1.2 | 0.8 |
| MIP-3 beta (Macrophage Inflammatory | 1.5 | 0.7 | 2.5 | 0.4 |
| Protein-3 beta) | | | | |
| MMP-9 (Matrix Metalloproteinase-9) | 0.9 | 1.2 | 0.2 | 5.3 |
| MPO (Myeloperoxidase) | 2.2 | 0.5 | 0.3 | 3.7 |
| Myoglobin | — | — | — | — |
| OSM (Oncostatin M) | 1.8 | 0.6 | 2.1 | 0.5 |
| RANTES (Regulation Upon Activation, Normal | 3.1 | 0.3 | 15.4 | 0.1 |
| T-Cell Expressed and Secreted) | | | | |
| SAP (Serum Amyloid P) | 1.0 | 1.0 | 0.4 | 2.6 |
| SCF (Stem Cell Factor) | 1.9 | 0.5 | 2.1 | 0.5 |
| SGOT (Serum Glutamic-Oxaloacetic | 1.9 | 0.5 | 1.4 | 0.7 |
| Transaminase) | | | | |
| TIMP-1 (Tissue Inhibitor of Metalloproteinase | 0.6 | 1.7 | 0.1 | 13.4 |
| Type-1) | | | | |
| Tissue Factor | 0.3 | 3.8 | 0.1 | 7.6 |
| TNF-alpha (Tumor Necrosis Factor-alpha) | 1.7 | 0.6 | 1.9 | 0.5 |
| TPO (Thrombopoietin) | 1.6 | 0.6 | 1.1 | 0.9 |
| VCAM-1 (Vascular Cell Adhesion Molecule-1) | 2.5 | 0.4 | 4.0 | 0.2 |
| VEGF (Vascular Endothelial Cell Growth | 0.1 | 7.1 | 0.2 | 4.0 |
| Factor) | | | | |
| vWF (von Willebrand Factor) | 0.7 | 1.5 | 0.3 | 3.0 |

### Example 9

### Identification of Proteins which are Differentially Expressed in Tumors which Respond Favorably (DU145) or Poorly (PC-3) to Viral Therapy

[0329] To identify human tumor proteins which are differentially expressed in tumors which respond favorably or unfavorably to viral therapy, DU145 or PC-3 cells were grown in 60 mm dishes and mock-infected or infected with the GLV-1h68 virus or WR virus at a MOI of 10. DU145 is a human prostate cancer cell line which responds favorably to viral therapy; PC-3 is a human prostate cancer cell line which responds poorly to viral therapy. Twenty-four hours after infection supernatants were collected and cells were prepared in lysis buffer (50 mM Tris, pH 7.5, 2 mM EDTA, 0.1% Triton X-100). Protein expression profiles were determined for the supernatants and cell lysates by Rules-Based Medicine, Inc. using the HumanMAP® multi-analyte profile immunoassay. The assay measures human protein expression levels in the supernatant and cell lysate samples. Tables 19 and 20 show the human protein expression profiles of mock-infected or GLV-1h68 virus-infected PC-3 and DU145 cells in collected supernatants or collected cell lysates, respectively.

TABLE 19
Fold Difference in Human Protein Expression Levels in
DU145 versus PC-3 human Prostate Cancer Cells (supernatant)

| | Fold difference in protein levels | | | | |
|---|---|---|---|---|---|
| | | 1h68- | 1h68- | WR- | |
| | Untreated | treated | treated | treated | WR-treated |
| Human Protein | DU145/ | DU145/ | PC-3/ | DU145/ | PC-3/ |
| (tumor cell culture | Untreated | Untreated | Untreated | Untreated | Untreated |
| supernatant) | PC-3 | DU145 | PC-3 | DU145 | PC-3 |
| Alpha-1 Antitrypsin | 171.38 | 0.36 | 0.69 | 0.22 | 0.38 |
| Adiponectin | — | — | — | — | — |
| Alpha-2 Macroglobulin | — | — | — | — | — |
| Alpha-Fetoprotein | 0.45 | 2.02 | 0.52 | 2.93 | 0.73 |
| Apolipoprotein A1 | — | — | — | — | — |
| Apolipoprotein CIII | — | — | — | — | — |
| Apolipoprotein H | 18.19 | 0.23 | 0.62 | 0.10 | — |
| Beta-2 Microglobulin | 2.15 | 0.35 | 0.74 | 0.27 | 0.38 |
| Brain-Derived | 0.70 | 1.76 | 3.33 | 1.10 | 1.50 |
| Neurotrophic Factor | | | | | |
| Complement 3 | 1952.96 | 0.33 | — | 0.19 | — |
| Cancer Antigen 125 | 5.68 | 1.46 | 1.01 | 1.02 | 0.83 |
| Cancer Antigen 19-9 | 10.75 | 0.95 | 1.43 | 0.79 | 1.31 |
| Calcitonin | — | — | — | — | — |
| CD40 | 2.05 | 1.53 | 0.92 | 2.14 | 1.21 |
| CD40 Ligand | 0.85 | 2.09 | 0.86 | 3.56 | 0.96 |
| Carcinoembryonic Antigen | 0.18 | 0.56 | 4.47 | 0.49 | 0.65 |
| Creatine Kinase-MB | 0.85 | 0.58 | 0.85 | 1.02 | 0.96 |
| C Reactive Protein | — | — | 1.51 | — | 1.26 |
| EGF | 12.61 | 1.98 | 40.29 | 2.17 | 49.71 |
| ENA-78 | 5.21 | 0.23 | 2.07 | 0.11 | 1.07 |
| Endothelin-1 | 5.00 | 0.39 | 2.24 | 0.30 | 1.08 |
| EN-RAGE | — | 2.34 | — | 1.28 | — |
| Eotaxin | — | 0.53 | — | 0.35 | — |
| Erythropoietin | 2.81 | 0.96 | 0.96 | 0.86 | 0.67 |
| Fatty Acid Binding Protein | 0.62 | 0.65 | 0.43 | 0.33 | 0.49 |
| Factor VII | — | — | 0.96 | — | 0.96 |
| Ferritin | 56.73 | 0.90 | 0.80 | 0.19 | 0.51 |
| FGF basic | 4.14 | 0.94 | 1.34 | 0.71 | 0.93 |
| Fibrinogen | — | 0.16 | — | — | — |
| G-CSF | — | — | 0.41 | — | 0.22 |
| Growth Hormone | — | — | — | — | 1.59 |
| GM-CSF | 0.14 | 5.14 | 1.00 | 0.57 | 0.53 |
| Glutathione S-Transferase | — | — | — | — | — |
| Haptoglobin | — | — | — | — | — |
| ICAM-1 | 4.44 | 1.06 | 0.88 | 0.93 | 1.08 |
| IFN-gamma | — | 1.03 | — | — | — |
| IgA | — | — | — | — | — |
| IgE | — | — | — | — | — |
| IGF-1 | — | — | — | — | — |
| IgM | — | — | — | — | — |
| IL-10 | 1.35 | 1.20 | 0.70 | 1.19 | 0.66 |
| IL-12p40 | — | 0.00 | — | 1.02 | — |
| IL-12p70 | 1.06 | 1.14 | 1.20 | 0.82 | 0.79 |
| IL-13 | 1.14 | 0.59 | 1.02 | 0.73 | 0.82 |
| IL-15 | 4.43 | 0.50 | 1.71 | 0.68 | 0.96 |
| IL-16 | — | — | — | — | — |
| IL-18 | 0.50 | 7.19 | 4.82 | 0.99 | 0.60 |
| IL-1 alpha | — | — | 0.78 | — | 0.51 |
| IL-1 beta | 0.00 | 1.03 | 0.52 | — | 0.09 |
| IL-1 ra | 0.03 | 1.43 | 0.88 | 1.92 | 0.39 |
| IL-2 | — | — | 1.33 | — | — |
| IL-3 | — | — | — | — | — |
| IL-4 | — | — | — | — | — |
| IL-5 | — | — | 0.54 | — | — |
| IL-6 | 1.06 | 0.21 | 3.44 | 0.41 | 7.31 |
| IL-7 | 0.63 | 1.16 | 0.73 | 0.84 | 0.43 |
| IL-8 | <0.035 | 1.67 | — | 1.33 | — |
| Insulin | — | — | — | — | — |
| Leptin | — | — | — | — | — |
| Lipoprotein (a) | 1.75 | 1.32 | 1.49 | 0.72 | 1.62 |
| Lymphotactin | — | — | — | — | — |
| MCP-1 | 0.66 | 0.05 | 0.04 | 0.11 | 0.28 |
| MDC | 3.97 | 0.52 | 0.49 | 0.35 | 0.28 |
| MIP-1 alpha | 2.48 | 0.94 | 1.18 | 0.82 | 0.87 |
| MIP-1 beta | 0.14 | 1.03 | 1.12 | 2.84 | 1.16 |
| MMP-2 | 3.56 | 0.94 | 1.14 | 0.77 | 0.81 |
| MMP-3 | 0.03 | 0.42 | 0.52 | 0.33 | 0.18 |
| MMP-9 | — | — | 0.54 | — | 0.75 |
| Myeloperoxidase | — | — | — | — | — |
| Myoglobin | 0.35 | 1.78 | 1.02 | 1.00 | 0.62 |
| PAI-1 | 0.00 | 1.83 | 1.13 | 1.02 | 0.74 |
| Prostatic Acid | 0.22 | 0.22 | 0.33 | 0.11 | 0.21 |
| Phosphatase | | | | | |
| PAPP-A | — | 0.86 | — | 0.66 | — |
| Prostate Specific Antigen, | 19.42 | — | — | 0.11 | 0.96 |
| Free | | | | | |
| RANTES | 109.71 | 0.01 | 0.36 | 0.09 | 1.41 |
| Serum Amyloid P | — | — | — | — | — |
| Stem Cell Factor | 0.58 | 0.51 | 1.05 | 0.35 | 0.81 |
| SGOT | — | — | — | 0.23 | — |
| SHBG | 1.85 | 0.38 | 0.70 | 0.19 | — |
| Thyroxine Binding | — | — | — | — | — |
| Globulin | | | | | |
| Tissue Factor | 9.30 | 2.09 | 0.63 | 2.12 | 0.96 |
| TIMP-1 | 0.51 | 0.23 | 0.54 | 0.11 | 0.17 |
| TNF RII | 12.98 | 0.36 | 0.51 | 0.27 | 0.51 |
| TNF-alpha | — | — | 0.49 | — | 0.46 |
| TNF-beta | 2.39 | — | 1.02 | 3.25 | — |
| Thrombopoietin | — | — | 2.00 | — | 1.36 |
| Thyroid Stimulating | — | — | — | — | — |
| Hormone | | | | | |
| VCAM-1 | 1.66 | 1.03 | 1.65 | 0.89 | 1.28 |
| VEGF | 24.59 | 0.40 | 1.37 | 0.22 | 0.71 |
| von Willebrand Factor | — | — | — | — | — |

TABLE 20
Fold Difference in Human Protein Expression Levels in
DU145 versus PC-3 human Prostate Cancer Cells (cell lysate)

| | Fold change in protein levels | | | | |
|---|---|---|---|---|---|
| | | 1h68- | 1h68- | WR- | |
| | Untreated | treated | treated | treated | WR-treated |
| | DU145/ | DU145/ | PC-3/ | DU145/ | PC-3/ |
| Human Protein | Untreated | Untreated | Untreated | Untreated | Untreated |
| (tumor cell lysate) | PC-3 | DU145 | PC-3 | DU145 | PC-3 |
| Alpha-1 Antitrypsin | 16.19 | 0.31 | 0.76 | 0.21 | 0.26 |
| Adiponectin | 0.73 | 0.83 | 1.83 | 0.74 | 0.72 |
| Alpha-2 Macroglobulin | 0.88 | 1.16 | 1.13 | 1.45 | 0.88 |
| Alpha-Fetoprotein | 1.82 | 0.64 | 1.12 | 0.66 | 0.98 |
| Apolipoprotein A1 | — | — | — | — | — |
| Apolipoprotein CIII | 0.30 | 0.77 | — | 1.04 | — |
| Apolipoprotein H | — | — | — | 0.00 | — |
| Beta-2 Microglobulin | 1.29 | 0.22 | 0.83 | 0.16 | 0.30 |
| Brain-Derived | 0.15 | 0.37 | 1.37 | 0.44 | 0.38 |
| Neurotrophic Factor | | | | | |
| Complement 3 | — | 0.02 | — | 0.00 | — |
| Cancer Antigen 125 | 1.61 | 0.25 | 0.72 | 0.22 | 0.30 |
| Cancer Antigen 19-9 | 3.52 | 0.52 | 0.58 | 0.49 | 0.19 |
| Calcitonin | 0.55 | 0.76 | 0.82 | 0.78 | 0.60 |
| CD40 | 1.45 | 0.69 | 1.29 | 0.74 | 0.85 |
| CD40 Ligand | 1.32 | 0.79 | 1.19 | 0.68 | 0.67 |
| Carcinoembryonic Antigen | 0.18 | 0.22 | 0.93 | 0.21 | 0.64 |
| Creatine Kinase-MB | 0.78 | 1.06 | 0.85 | 0.86 | 0.78 |
| C Reactive Protein | — | — | — | — | — |
| EGF | 0.46 | 0.11 | 0.45 | 0.11 | 0.32 |
| ENA-78 | 0.34 | 0.10 | 0.54 | 0.18 | 0.68 |
| Endothelin-1 | 0.34 | 0.51 | 0.38 | 0.46 | 0.43 |
| EN-RAGE | — | — | — | — | — |
| Eotaxin | 1.04 | 0.75 | 1.34 | 0.85 | 0.73 |
| Erythropoietin | 0.41 | — | — | — | — |
| Fatty Acid Binding Protein | 0.26 | 0.37 | 0.99 | 0.36 | 0.68 |
| Factor VII | 0.62 | 0.39 | 1.20 | 0.48 | 0.59 |
| Ferritin | 7.95 | 0.59 | 1.56 | 0.60 | 0.75 |
| FGF basic | 0.81 | 0.77 | 1.82 | 0.74 | 0.57 |
| Fibrinogen | — | — | — | — | — |
| G-CSF | 0.68 | 0.84 | 0.76 | 0.94 | 0.95 |
| Growth Hormone | 0.39 | 0.33 | 0.71 | — | 0.63 |
| GM-CSF | 0.04 | 2.46 | 0.78 | 0.42 | 0.25 |
| Glutathione S-Transferase | 0.71 | 0.76 | 1.17 | 0.84 | 0.95 |
| Haptoglobin | — | — | — | — | — |
| ICAM-1 | 1.62 | 0.52 | 0.73 | 0.71 | 0.51 |
| IFN-gamma | 1.09 | 0.72 | 1.29 | 0.74 | 1.23 |
| IgA | — | — | — | — | — |
| IgE | 0.13 | — | 0.29 | — | 0.99 |
| IGF-1 | — | — | — | — | — |
| IgM | — | — | — | — | — |
| IL-10 | 0.20 | 0.84 | 1.00 | 0.88 | 0.95 |
| IL-12p40 | 0.55 | 0.33 | 0.70 | 0.60 | 0.57 |
| IL-12p70 | 0.64 | 0.66 | 0.88 | 1.07 | 0.78 |
| IL-13 | 0.65 | 0.75 | 0.96 | 0.82 | 0.91 |
| IL-15 | 0.69 | 0.47 | 1.08 | 0.70 | 0.83 |
| IL-16 | 0.62 | 0.46 | 0.83 | 0.64 | 0.66 |
| IL-18 | 0.52 | 2.00 | 1.87 | 1.47 | 0.63 |
| IL-1 alpha | — | — | 1.13 | — | 0.98 |
| IL-1 beta | 0.01 | 0.51 | 0.53 | 0.35 | 0.05 |
| IL-1 ra | 0.03 | 0.90 | 0.92 | 1.01 | 0.61 |
| IL-2 | 0.35 | 0.27 | 0.55 | 0.26 | 0.47 |
| IL-3 | 0.58 | — | — | — | — |
| IL-4 | — | — | — | — | — |
| IL-5 | 0.53 | 0.78 | 0.61 | 0.72 | 0.85 |
| IL-6 | 4.05 | 0.13 | 2.21 | 0.14 | 1.63 |
| IL-7 | 0.27 | 0.66 | 0.81 | 0.77 | 0.60 |
| IL-8 | 0.01 | 0.55 | 1.04 | 0.52 | 0.62 |
| Insulin | — | — | — | — | 0.77 |
| Leptin | 1.68 | 0.39 | 1.29 | — | 1.36 |
| Lipoprotein (a) | — | — | — | — | — |
| Lymphotactin | 0.72 | 0.38 | 0.88 | 0.34 | 0.85 |
| MCP-1 | 0.11 | 0.72 | 0.21 | 0.89 | 0.28 |
| MDC | 1.00 | 0.10 | 0.38 | 0.75 | 0.23 |
| MIP-1 alpha | 0.73 | 0.40 | 1.06 | 0.51 | 0.72 |
| MIP-1 beta | 0.38 | 0.41 | 0.70 | 0.55 | 0.52 |
| MMP-2 | 1.05 | 0.10 | 0.56 | 0.04 | 0.18 |
| MMP-3 | 0.28 | — | 0.81 | — | 0.59 |
| MMP-9 | 0.86 | 0.69 | 1.29 | 0.57 | 0.86 |
| Myeloperoxidase | — | — | — | — | — |
| Myoglobin | 0.53 | 0.66 | 1.56 | 0.75 | 0.71 |
| PAI-1 | — | — | 0.76 | — | 0.44 |
| Prostatic Acid | 0.06 | 0.35 | 0.97 | 0.40 | 0.50 |
| Phosphatase | | | | | |
| PAPP-A | 1.10 | 0.79 | 1.08 | 0.74 | 0.80 |
| Prostate Specific Antigen, | 0.53 | 0.84 | 0.80 | 0.48 | 0.44 |
| Free | | | | | |
| RANTES | 6.85 | — | — | — | 0.14 |
| Serum Amyloid P | — | — | — | — | — |
| Stem Cell Factor | 0.62 | 0.26 | 0.77 | 0.46 | 0.67 |
| SGOT | 1.70 | 1.27 | 1.49 | 1.72 | 0.70 |
| SHBG | — | — | — | — | — |
| Thyroxine Binding | — | — | — | — | — |
| Globulin | | | | | |
| Tissue Factor | 14.27 | 0.45 | 1.18 | 0.42 | 0.56 |
| TIMP-1 | 0.20 | 0.04 | 0.51 | 0.04 | 0.22 |
| TNF RII | 1.40 | 0.09 | 0.20 | 0.11 | 0.07 |
| TNF-alpha | 0.19 | 0.27 | 0.50 | 0.67 | 0.44 |
| TNF-beta | 0.67 | 0.29 | 0.56 | 0.53 | 0.68 |
| Thrombopoietin | 0.64 | 0.36 | 1.05 | 0.59 | 0.84 |
| Thyroid Stimulating | 1.04 | 0.42 | 0.86 | — | 1.10 |
| Hormone | | | | | |
| VCAM-1 | — | — | — | — | — |
| VEGF | 1.14 | 0.16 | 0.51 | 0.09 | 0.17 |
| von Willebrand Factor | — | — | — | — | — |

### Example 10

### Identification of Proteins which are Differentially Expressed in Xenograft Tumors which Respond Favorably (PANC-1) or Poorly (HT-29) to Viral Therapy

[0330] To identify differentially expressed proteins in virus-infected tumors derived from cancer cells known to respond favorably to viral therapy versus cancer cells known to respond poorly to viral therapy, PANC-1 human tumor cells or HT-29 human tumor cells were implanted subcutaneously into nude mice (male or female). Once the tumors reached a desired size, (approximately 200-400 mm³), the mice were injected intravenously with 5×10⁶ pfu/100 μl PBS/mouse of vaccinia virus GLV-1h68. Mice were sacrificed at 42 days after injection. Tumors were excised and prepared in Tris buffer. Human protein profiles were determined by Rules-Based Medicine, Inc. using the HumanMAP® multi-analyte profile immunoassay for tumors injected with GLV-1h68 (treated) and non-injected control tumors (untreated). The assay measures the level of expression of human proteins in the tumor sample. Table 21 shows fold change in protein expression levels of human proteins between treated and untreated xenograft tumors derived from PANC-1 cells or HT29 cells.

TABLE 21
Fold Change in Human Protein Expression Levels in GLV-1h68 treated
and untreated PANC-1 human pancreatic and HT29 human colorectal
carcinoma xenograft tumors

| | Fold change in protein level | | | |
|---|---|---|---|---|
| | Untreated/ | | Treated/ | |
| | Treated | | Untreated | |
| Human protein | PANC-1 | HT29 | PANC-1 | HT29 |
| Alpha-1 Antitrypsin | — | 0.8 | — | 1.2 |
| Adiponectin | — | 2.2 | — | 0.5 |
| Alpha-2 Macroglobulin | 1.3 | 1.2 | 0.7 | 0.8 |
| Alpha-Fetoprotein | 1.6 | 0.6 | 0.6 | 1.6 |
| Apolipoprotein A1 | — | — | — | — |
| Apolipoprotein CIII | — | — | — | — |
| Apolipoprotein H | — | 0.5 | — | 2.1 |
| Beta-2 Microglobulin | 2.1 | 1.0 | 0.5 | 1.0 |
| Brain-Derived | 0.4 | 0.4 | 2.3 | 2.5 |
| Neurotrophic Factor | | | | |
| Complement 3 | — | — | — | — |
| Cancer Antigen 125 | 0.6 | 1.2 | 1.6 | 0.8 |
| Cancer Antigen 19-9 | — | 0.7 | — | 1.5 |
| Calcitonin | — | 0.4 | — | 2.7 |
| CD40 | 1.0 | 0.8 | 1.1 | 1.2 |
| CD40 Ligand | 0.8 | 1.3 | 1.2 | 0.7 |
| Carcinoembryonic Antigen | 1.5 | — | 0.7 | — |
| Creatine Kinase-MB | 2.1 | 0.7 | 0.5 | 1.5 |
| C Reactive Protein | 1.7 | 0.9 | 0.6 | 1.1 |
| EGF | 10.7 | 0.5 | 0.1 | 2.0 |
| ENA-78 | 0.5 | 0.9 | 1.9 | 1.1 |
| Endothelin-1 | 1.6 | 0.9 | 0.6 | 1.1 |
| EN-RAGE | — | — | — | — |
| Eotaxin | 1.2 | 1.0 | 0.9 | 1.0 |
| Erythropoietin | — | 0.6 | — | 1.5 |
| Fatty Acid Binding Protein | 5.7 | 0.5 | 0.2 | 1.9 |
| Factor VII | 2.3 | 0.8 | 0.4 | 1.2 |
| Ferritin | 0.2 | 1.0 | 5.1 | 1.0 |
| FGF basic | 0.5 | 0.6 | 2.1 | 1.8 |
| Fibrinogen | — | — | — | — |
| G-CSF | 0.6 | 1.0 | 1.6 | 1.0 |
| Growth Hormone | 0.6 | 1.0 | 1.6 | 1.0 |
| GM-CSF | 1.0 | 0.7 | 1.0 | 1.4 |
| Glutathione S-Transferase | 1.2 | 0.9 | 0.8 | 1.1 |
| Haptoglobin | — | — | — | — |
| ICAM-1 | 1.0 | 0.5 | 1.0 | 2.2 |
| IFN-gamma | 0.9 | 1.3 | 1.1 | 0.8 |
| IgA | — | — | — | — |
| IgE | 1.6 | 0.7 | 0.6 | 1.3 |
| IGF-1 | 8.2 | — | 0.1 | — |
| IgM | — | — | — | — |
| IL-10 | 1.0 | 0.7 | 1.0 | 1.4 |
| IL-12p40 | 3.2 | 0.9 | 0.3 | 1.1 |
| IL-12p70 | 1.7 | 0.9 | 0.6 | 1.1 |
| IL-13 | 0.9 | 0.8 | 1.1 | 1.3 |
| IL-15 | 1.6 | 0.7 | 0.6 | 1.5 |
| IL-16 | 1.4 | 0.4 | 0.7 | 2.3 |
| IL-18 | 0.6 | 0.7 | 1.8 | 1.4 |
| IL-1 alpha | 0.5 | 0.9 | 2.1 | 1.1 |
| IL-1 beta | 1.9 | 2.8 | 0.5 | 0.4 |
| IL-1 ra | 2.2 | 0.7 | 0.4 | 1.4 |
| IL-2 | 3.0 | 0.3 | 0.3 | 2.9 |
| IL-3 | — | — | — | — |
| IL-4 | — | — | — | — |
| IL-5 | 1.3 | 0.7 | 0.8 | 1.4 |
| IL-6 | 0.6 | 0.5 | 1.7 | 1.9 |
| IL-7 | 1.1 | 0.7 | 0.9 | 1.4 |
| IL-8 | 1.1 | 1.4 | 0.9 | 0.7 |
| Insulin | — | — | — | — |
| Leptin | — | 0.9 | — | 1.1 |
| Lipoprotein (a) | — | 0.8 | — | 1.2 |
| Lymphotactin | — | 0.6 | — | 1.6 |
| MCP-1 | 0.4 | 5.4 | 2.7 | 0.2 |
| MDC | — | 2.2 | — | 0.4 |
| MIP-1 alpha | 1.5 | 0.9 | 0.7 | 1.1 |
| MIP-1 beta | 3.2 | 0.4 | 0.3 | 2.5 |
| MMP-2 | 1.5 | 0.9 | 0.7 | 1.1 |
| MMP-3 | 1.6 | 1.3 | 0.6 | 0.8 |
| MMP-9 | 1.6 | 0.7 | 0.6 | 1.4 |
| Myeloperoxidase | — | — | — | — |
| Myoglobin | — | — | — | — |
| PAI-1 | 0.2 | 2.1 | 4.6 | 0.5 |
| Prostatic Acid | 2.0 | 0.7 | 0.5 | 1.5 |
| Phosphatase | | | | |
| PAPP-A | 0.4 | 0.7 | 2.3 | 1.4 |
| Prostate Specific Antigen, | — | 0.7 | — | 1.4 |
| Free | | | | |
| RANTES | 2.1 | 5.4 | 0.5 | 0.2 |
| Serum Amyloid P | — | — | — | — |
| Stem Cell Factor | 1.8 | 0.7 | 0.5 | 1.4 |
| SGOT | 0.9 | 1.9 | 1.1 | 0.5 |
| SHBG | — | — | — | — |
| Thyroxine Binding | — | — | — | — |
| Globulin | | | | |
| Tissue Factor | 0.3 | 0.9 | 3.4 | 1.1 |
| TIMP-1 | 0.4 | — | 2.6 | — |
| TNF RII | 0.6 | 0.6 | 1.6 | 1.8 |
| TNF-alpha | 1.3 | 1.2 | 0.7 | 0.8 |
| TNF-beta | 3.9 | 0.6 | 0.3 | 1.6 |
| Thrombopoietin | 1.9 | 0.6 | 0.5 | 1.6 |
| Thyroid Stimulating | 1.5 | 1.9 | 0.7 | 0.5 |
| Hormone | | | | |
| VCAM-1 | 1.3 | 1.3 | 0.8 | 0.8 |
| VEGF | 1.5 | 1.2 | 0.7 | 0.8 |
| von Willebrand Factor | 0.4 | 1.0 | 2.8 | 1.0 |

### Example 11

### Specificity of Rodent Multi-Analyte Profiles (MAPs)

[0331] To demonstrate the specificity of rodent multi-analyte profile assays employed in examples above, human breast carcinoma GI-101A cells were seeded in a 60 mm dish at 5×10⁶ cells/dish. The following day, the medium was exchanged for fresh medium, and 24 hours later the supernatant was collected to determine antibody specificity using HumanMAP® and RodentMAP™ multi-analyte profile immunoassays carried out by Rules-Based Medicine, Inc. Table 22 shows the level of expression detected using RodentMAP™ or HumanMAP® multi-analyte profile assays.

TABLE 22
Cross-reactivity of Expressed Human Tumor Proteins in
Human and Rodent Multi-analyte Profile Assays

| | | | | Cross |
|---|---|---|---|---|
| | | Human | Rodent | Reactivity |
| Antigen | | MAP | MAP | (%)* |
| Apolipoprotein A1 | mg/mL | 0.0E+00 | 0.000 | — |
| CD40 | ng/mL | 0.0E+00 | 0.000 | — |
| CD40 Ligand | ng/mL | 0.0E+00 | 0.000 | — |
| C Reactive Protein | ug/mL | 0.0E+00 | 0.000 | — |
| EGF | pg/mL | 9.4E+00 | 0.830 | 8.87 |
| Endothelin-1 | pg/mL | 2.5E+01 | 25.900 | 103.19 |
| Eotaxin | pg/mL | 2.8E+01 | 0.000 | 0.00 |
| Factor VII | ng/mL | 0.0E+00 | 0.000 | — |
| FGF basic | pg/mL | 3.9E+02 | 0.230 | 58.38 |
| Fibrinogen | mg/mL | 0.0E+00 | 0.000 | — |
| GM-CSF | pg/mL | 0.0E+00 | 0.578 | — |
| GST-alpha | ng/mL | 1.8E−02 | 0.000 | 0.00 |
| Haptoglobin | mg/mL | 0.0E+00 | 0.000 | — |
| IFN-gamma | pg/mL | 0.0E+00 | 3.080 | — |
| IgA | mg/mL | 0.0E+00 | 0.000 | — |
| IL-10 | pg/mL | 2.1E+00 | 0.000 | 0.00 |
| IL-12p70 | pg/mL | 9.2E+00 | 0.000 | 0.00 |
| IL-18 | pg/mL | 1.2E+01 | 0.000 | 0.00 |
| IL-1 alpha | ng/mL | 0.0E+00 | 0.000 | — |
| IL-1 beta | pg/mL | 1.3E−01 | 0.000 | 0.00 |
| IL-2 | pg/mL | 5.7E+00 | 0.000 | 0.00 |
| IL-3 | ng/mL | 6.8E−03 | 0.000 | 0.00 |
| IL-4 | pg/mL | 6.9E−01 | 10.600 | 1536.23 |
| IL-5 | pg/mL | 2.2E+00 | 0.000 | 0.00 |
| IL-6 | pg/mL | 2.5E−01 | 0.000 | 0.00 |
| IL-7 | pg/mL | 2.5E+01 | 7 | 27.56 |
| Lymphotactin | ng/mL | 0.0E+00 | 0.00147 | — |
| MCP-1 | pg/mL | 6.0E+01 | 0.000 | 0.00 |
| MDC | pg/ml | 3.2E+00 | 0.000 | 0.00 |
| MIP-1 alpha | pg/mL | 9.3E+00 | 0.000 | 0.00 |
| MIP-1 beta | pg/mL | 1.6E+01 | 0.600 | 3.66 |
| MMP-9 | ng/mL | 3.9E+00 | 0.000 | 0.00 |
| Myeloperoxidase | ng/mL | 7.0E−01 | 0.000 | 0.00 |
| Myoglobin | ng/mL | 7.3E−02 | 0.735 | 1006.85 |
| RANTES | ng/mL | 1.6E−03 | 0.000 | 0.00 |
| Serum Amyloid P | ug/mL | 0.0E+00 | 0.010 | — |
| Stem Cell Factor | pg/mL | 8.9E+01 | 0.000 | 0.00 |
| SGOT | ug/mL | 0.0E+00 | 0.000 | — |
| TIMP-1 | ng/ml | 0.0E+00 | 0.009 | 0.01 |
| Tissue Factor | ng/ml | 6.4E+01 | 0.000 | — |
| TNF-alpha | pg/mL | 4.7E−01 | 6 | 1276.60 |
| Thrombopoietin | ng/mL | 5.0E−01 | 0.000 | 0.00 |
| VCAM-1 | ng/mL | 2.0E−02 | 0.000 | 0.00 |
| VEGF | pg/mL | 1.7E+04 | 384.000 | 2.25 |
| von Willebrand Factor | ug/mL | 0.0E+00 | 0.000 | — |

*Cross reactivity = RodentMAP/HumanMAP * 100

### Example 12

### Reproducibility of Human Multi-Analyte Profile (MAP) Assay

[0332] To demonstrate the reproducibility of the multi-analyte profile assays, protein expression profiles cells were assayed on multiple days. Supernatant was taken from cultured human breast carcinoma GI-101A cells on Day 0 (Test 1) and Day 13 (Test 2). Protein profiles of supernatants were determined using the HumanMAP® multi-analyte profile immunoassay carried out by Rules-Based Medicine, Inc. Table 23 shows the human protein concentration of proteins for Test 1 and Test 2 supernatants. Some antigens may have had a lower score due to the stability of the proteins during storage.

TABLE 23
Reproducibility of Protein Expression Profiles at Different Sample Times

| | | Test 1 | Test 2 | | |
|---|---|---|---|---|---|
| Antigen | | (Day 0) | (Day 13) | Average | STDEV |
| Alpha-1 Antitrypsin | mg/mL | 1.3E−07 | 1.3E−07 | 1.32E−07 | 3.54E−09 |
| Adiponectin | ug/mL | 0.0016 | 0.0021 | 0.0018 | 0.00035 |
| Alpha-2 Macroglobulin | mg/mL | 7.7E−05 | 7.1E−05 | 7.41E−05 | 3.75E−06 |
| Alpha-Fetoprotein | ng/mL | 0.28 | 0.26 | 0.270 | 0.008 |
| Apolipoprotein A1 | mg/mL | <LOW> | 1.5E−07 | | |
| Apolipoprotein CIII | ug/mL | <LOW> | 3.4E−05 | | |
| Apolipoprotein H | ug/mL | 9.6E−06 | 1.7E−05 | 1.32E−05 | 5.01E−06 |
| Beta-2 Microglobulin | ug/mL | 0.044 | 0.036 | 0.040 | 0.006 |
| Brain-Derived Neurotrophic Factor | ng/mL | 0.027 | 0.017 | 0.022 | 0.007 |
| Complement 3 | mg/mL | 0.00023 | 0.00023 | 2.29E−04 | 7.07E−07 |
| Cancer Antigen 125 | U/mL | <LOW> | <LOW> | | |
| Cancer Antigen 19-9 | U/mL | 3.5 | 0.27 | 1.89 | 2.28 |
| Calcitonin | pg/mL | <LOW> | <LOW> | | |
| CD40 | ng/mL | <LOW> | <LOW> | | |
| CD40 Ligand | ng/mL | <LOW> | <LOW> | | |
| Carcinoembryonic Antigen | ng/mL | <LOW> | <LOW> | | |
| Creatine Kinase-MB | ng/mL | <LOW> | <LOW> | | |
| C Reactive Protein | ug/mL | <LOW> | <LOW> | | |
| EGF | pg/mL | 9.8 | 8.6 | 9.21 | 0.90 |
| ENA-78 | ng/mL | 0.029 | 0.018 | 0.024 | 0.008 |
| Endothelin-1 | pg/mL | 25 | 23 | 24 | 2 |
| EN-RAGE | ng/mL | 0.0024 | <LOW> | | |
| Eotaxin | pg/mL | 28 | 23 | 25 | 3 |
| Erythropoietin | pg/mL | 60 | 46 | 53 | 10 |
| Fatty Acid Binding Protein | ng/mL | <LOW> | 0.13 | | |
| Factor VII | ng/mL | <LOW> | 0.13 | | |
| Ferritin | ng/mL | 0.030 | <LOW> | | |
| FGF basic | pg/mL | 394 | 163 | 279 | 163 |
| Fibrinogen | mg/mL | <LOW> | <LOW> | | |
| G-CSF | pg/mL | <LOW> | <LOW> | | |
| Growth Hormone | ng/mL | <LOW> | <LOW> | | |
| GM-CSF | pg/mL | 1.0 | 1.6 | 1.31 | 0.44 |
| Glutathione S-Transferase | ng/mL | 0.18 | 0.17 | 0.18 | 0.01 |
| Haptoglobin | mg/mL | <LOW> | <LOW> | | |
| ICAM-1 | ng/mL | 0.28 | 0.17 | 0.23 | 0.08 |
| IFN-gamma | pg/mL | <LOW> | <LOW> | | |
| IgA | mg/mL | <LOW> | <LOW> | | |
| IgE | ng/mL | <LOW> | <LOW> | | |
| IGF-1 | ng/mL | <LOW> | <LOW> | | |
| IgM | mg/mL | 9.6E−08 | <LOW> | | |
| IL-10 | pg/mL | 2.1 | 2.1 | 2.06 | 0.01 |
| IL-12 p40 | ng/mL | 0.22 | 0.12 | 0.17 | 0.07 |
| IL-12 p70 | pg/mL | 22 | 15 | 18.05 | 4.88 |
| IL-13 | pg/mL | 9.0 | 8.2 | 8.64 | 0.57 |
| IL-15 | ng/mL | 0.13 | 0.12 | 0.13 | 0.00 |
| IL-16 | pg/mL | 11 | 3.9 | 7.44 | 5.03 |
| IL-18 | pg/mL | 12 | 3.7 | 7.84 | 5.88 |
| IL-1 alpha | ng/mL | <LOW> | <LOW> | | |
| IL-1 beta | pg/mL | 0.23 | 0.22 | 0.22 | 0.01 |
| IL-1 ra | pg/mL | <LOW> | <LOW> | | |
| IL-2 | pg/mL | 8.5 | 5.4 | 6.94 | 2.24 |
| IL-3 | ng/mL | 0.0068 | <LOW> | | |
| IL-4 | pg/mL | 5.3 | 8.7 | 7.02 | 2.38 |
| IL-5 | pg/mL | 2.2 | 1.5 | 1.82 | 0.49 |
| IL-6 | pg/mL | 0.55 | 0.35 | 0.45 | 0.14 |
| IL-7 | pg/mL | 38 | 45 | 41 | 5 |
| IL-8 | pg/mL | 5840 | 4440 | 5140 | 990 |
| Insulin | ulU/mL | 0.17 | <LOW> | | |
| Leptin | ng/mL | <LOW> | <LOW> | | |
| Lipoprotein (a) | ug/mL | 0.060 | <LOW> | | |
| Lymphotactin | ng/mL | 0.022 | <LOW> | | |
| MCP-1 | pg/mL | 60 | 57 | 58 | 2 |
| MDC | pg/mL | 3.2 | 1.6 | 2.40 | 1.18 |
| MIP-1 alpha | pg/mL | 15 | 6.7 | 10.69 | 5.67 |
| MIP-1 beta | pg/mL | 16 | 9.4 | 12.89 | 4.97 |
| MMP-2 | ng/mL | 142 | 21 | 81 | 86 |
| MMP-3 | ng/mL | 0.0061 | 0.0080 | 0.0071 | 0.0014 |
| MMP-9 | ng/mL | 3.9 | 3.4 | 3.61 | 0.36 |
| Myeloperoxidase | ng/mL | 0.70 | 0.74 | 0.72 | 0.03 |
| Myoglobin | ng/mL | 0.073 | 0.090 | 0.082 | 0.012 |
| PAI-1 | ng/mL | 0.37 | 0.51 | 0.442 | 0.095 |
| Prostatic Acid Phosphatase | ng/mL | <LOW> | <LOW> | | |
| PAPP-A | mlU/mL | 0.028 | 0.033 | 0.030 | 0.004 |
| Prostate Specific Antigen, Free | ng/mL | <LOW> | <LOW> | | |
| RANTES | ng/mL | 0.0023 | 0.0019 | 0.0021 | 0.0003 |
| Serum Amyloid P | ug/mL | <LOW> | <LOW> | | |
| Stem Cell Factor | pg/mL | 89 | 45 | 67 | 31 |
| SGOT | ug/mL | 1.4 | 0.93 | 1.16 | 0.32 |
| SHBG | nmol/L | <LOW> | <LOW> | | |
| Thyroxine Binding Globulin | ug/mL | <LOW> | <LOW> | | |
| Tissue Factor | ng/mL | <LOW> | 0.062 | | |
| TIMP-1 | ng/mL | 64 | 56 | 60 | 5 |
| TNF RII | ng/mL | 0.0014 | 0.0015 | 0.00147 | 0.00005 |
| TNF-alpha | pg/mL | 0.59 | 0.69 | 0.639 | 0.070 |
| TNF-beta | pg/mL | <LOW> | 1.5 | | |
| Thrombopoietin | ng/mL | 0.96 | 0.51 | 0.736 | 0.319 |
| Thyroid Stimulating Hormone | ulU/mL | <LOW> | <LOW> | | |
| VCAM-1 | ng/mL | 0.020 | <LOW> | | |
| VEGF | pg/mL | 17100 | 16100 | 16600 | 707 |
| von Willebrand Factor | ug/mL | 0.00035 | 0.00021 | 0.000278 | 0.000098 |

### Example 13

### Identification of Differentially Expressed Host Proteins in a Host Bearing Xenograft Tumors which Respond Favorably to Viral Therapy Using A549 Cells

[0333] To identify host proteins which are differentially expressed in hosts that respond favorably to viral therapy, A549 tumor cells (human lung carcinoma cells which are responsive to viral therapy) were implanted subcutaneously into nude mice (male or female). Once the tumors reached a desired size, the mice were injected intravenously with 5×10⁶ pfu/100 μl PBS/mouse of vaccinia virus GLV-1h68 or GLV-1h109. (GLV-1h109 is an LIVP vaccinia virus derived from GLV-1h68. The virus contains DNA encoding an anti-VEGF single chain antibody under the control of a vaccinia synthetic late promoter in place of the LacZ/rTFr expression cassette at the TK locus of GLV-1h68; U.S. patent application Ser. No. 11/975,088). Mice were sacrificed at 21 days post-injection. Tumors were excised and prepared in Tris buffer. A blood sample was taken from the same mice, and serum was prepared. Protein expression profiles were determined by Rules-Based Medicine, Inc. using the RodentMAP™ multi-analyte profile immunoassay. Table 24 shows host protein profiles for tumors injected with GLV-1h68 or GLV-1h109 (treated), and non-injected control tumors (untreated), with the fold change in mouse protein levels between tumors injected with virus, and tumors non-injected with virus at 21 days post-injection (n=2). Table 25 shows host protein profiles for serum proteins from mice with tumors injected with GLV-1h68 or GLV-1h109 (treated), and non-injected control serum (untreated), with the fold change in mouse protein levels between serum from mice injected with virus, and serum from non-injected mice with virus at 21 days post-injection.

TABLE 24
Fold Change in Host Protein Expression Levels in GLV-1h68-treated, GLV-
1h109-treated or Untreated A549 Human Lung Carcinoma Xenograft Tumors
(tumor extract)

| | Fold change in protein levels | | | |
|---|---|---|---|---|
| | 1h68- | 1h109- | untreated | untreated |
| | treated | treated | A549/ | A549/ |
| | A549/ | A549/ | 1h68- | 1h109- |
| | untreated | untreated | treated | treated |
| Mouse Protein from Tumor extracts | A549 | A549 | A549 | A549 |
| Apo A1 (Apolipoprotein A1) | 1.23 | 1.87 | 0.81 | 0.53 |
| CD40 | 2.90 | 4.08 | 0.34 | 0.25 |
| CD40 Ligand | 0.77 | 2.97 | 1.31 | 0.34 |
| CRP (C Reactive Protein) | 1.06 | 0.30 | 0.94 | 3.30 |
| EGF (Epidermal Growth Factor) | 1.26 | 3.91 | 0.79 | 0.26 |
| Endothelin-1 | 0.76 | 3.37 | 1.32 | 0.30 |
| Eotaxin | 24.53 | 59.73 | 0.04 | 0.02 |
| Factor VII | 0.57 | 0.86 | 1.75 | 1.17 |
| FGF-9 (Fibroblast Growth Factor-9) | 1.17 | 3.42 | 0.86 | 0.29 |
| FGF-basic (Fibroblast Growth Factor- | 0.70 | 0.16 | 1.43 | 6.43 |
| basic) | | | | |
| Fibrinogen | 1.81 | 1.25 | 0.55 | 0.80 |
| GCP-2 (Granulocyte Chemotactic Protein- | 4.04 | 5.41 | 0.25 | 0.18 |
| 2) | | | | |
| GM-CSF (Granulocyte Macrophage- | 6.53 | 14.78 | 0.15 | 0.07 |
| Colony Stimulating Factor) | | | | |
| GST-alpha (Glutathione S-Transferase | 0.76 | 0.44 | 1.31 | 2.25 |
| alpha) | | | | |
| Haptoglobin | 4.16 | 1.82 | 0.24 | 0.55 |
| IFN-gamma (Interferon-gamma) | 5.33 | 17.48 | 0.19 | 0.06 |
| IgA (Immunoglobulin A) | 1.11 | 0.68 | 0.90 | 1.48 |
| IL-10 (Interleukin-10) | 4.37 | 15.40 | 0.23 | 0.06 |
| IL-11 (Interleukin-11) | 1.86 | 2.40 | 0.54 | 0.42 |
| IL-12p70 (Interleukin-12p70) | 5.00 | 16.59 | 0.20 | 0.06 |
| IL-17 (Interleukin-17) | 3.40 | 10.32 | 0.29 | 0.10 |
| IL-18 (Interleukin-18) | 17.31 | 35.19 | 0.06 | 0.03 |
| IL-1 alpha (Interleukin-1 alpha) | 1.48 | 3.59 | 0.68 | 0.28 |
| IL-1 beta (Interleukin-1 beta) | 0.34 | 0.89 | 2.91 | 1.12 |
| IL-2 (Interleukin-2) | 1.66 | 5.37 | 0.60 | 0.19 |
| IL-3 (Interleukin-3) | 4.39 | 14.12 | 0.23 | 0.07 |
| IL-4 (Interleukin-4) | 6.70 | 21.04 | 0.15 | 0.05 |
| IL-5 (Interleukin-5) | 1.51 | 3.06 | 0.66 | 0.33 |
| IL-6 (Interleukin-6) | 22.91 | 16.32 | 0.04 | 0.06 |
| IL-7 (Interleukin-7) | 2.98 | 11.13 | 0.34 | 0.09 |
| IP-10 (Inducible Protein-10) | 79.98 | 296.58 | 0.01 | 0.003 |
| KC/GRO alpha (Melanoma Growth | 5.53 | 2.59 | 0.18 | 0.39 |
| Stimulatory Activity Protein) | | | | |
| LIF (Leukemia Inhibitory Factor) | 0.76 | 1.22 | 1.31 | 0.82 |
| Lymphotactin | 4.87 | 17.54 | 0.21 | 0.06 |
| MCP-1 (Monocyte Chemoattractant | 214.83 | 433.58 | 0.005 | 0.002 |
| Protein-1) | | | | |
| MCP-3 (Monocyte Chemoattractant | 32.96 | 85.93 | 0.03 | 0.01 |
| Protein-3) | | | | |
| MCP-5 (Monocyte Chemoattractant | 311.16 | 307.64 | 0.003 | 0.003 |
| Protein-5) | | | | |
| M-CSF (Macrophage-Colony Stimulating | 2.22 | 2.85 | 0.45 | 0.35 |
| Factor) | | | | |
| MDC (Macrophage-Derived Chemokine) | 7.69 | 17.92 | 0.13 | 0.06 |
| MIP-1alpha (Macrophage Inflammatory | 0.74 | 1.69 | 1.35 | 0.59 |
| Protein-1alpha) | | | | |
| MIP-1beta (Macrophage Inflammatory | 11.79 | 38.80 | 0.08 | 0.03 |
| Protein-1beta) | | | | |
| MIP-1gamma (Macrophage Inflammatory | 8.88 | 2.09 | 0.11 | 0.48 |
| Protein-1gamma) | | | | |
| MIP-2 (Macrophage Inflammatory Protein- | 8.83 | 15.78 | 0.11 | 0.06 |
| 2) | | | | |
| MIP-3beta (Macrophage Inflammatory | 1.59 | 6.57 | 0.63 | 0.15 |
| Protein-3beta) | | | | |
| MMP-9 (Matrix Metalloproteinase-9) | 2.80 | 1.91 | 0.36 | 0.52 |
| MPO (Myeloperoxidase) | 2.48 | 3.14 | 0.40 | 0.32 |
| Myoglobin | — | — | — | — |
| OSM (Oncostatin M) | 1.45 | 4.53 | 0.69 | 0.22 |
| RANTES (Regulation Upon Activation, | 11.11 | 106.67 | 0.09 | 0.01 |
| Normal T-Cell Expressed and Secreted) | | | | |
| SAP (Serum Amyloid P) | 1.16 | 1.17 | 0.86 | 0.85 |
| SCF (Stem Cell Factor) | 2.58 | 7.42 | 0.39 | 0.13 |
| SGOT (Serum Glutamic-Oxaloacetic | 0.70 | 0.92 | 1.43 | 1.08 |
| Transaminase) | | | | |
| TIMP-1 (Tissue Inhibitor of | 66.90 | 90.11 | 0.01 | 0.01 |
| Metalloproteinase Type-1) | | | | |
| Tissue Factor | 0.73 | 0.32 | 1.37 | 3.14 |
| TNF-alpha (Tumor Necrosis Factor-alpha) | 5.20 | 22.86 | 0.19 | 0.04 |
| TPO (Thrombopoietin) | 1.67 | 3.32 | 0.60 | 0.30 |
| VCAM-1 (Vascular Cell Adhesion | 1.48 | 1.24 | 0.67 | 0.81 |
| Molecule-1) | | | | |
| VEGF (Vascular Endothelial Cell Growth | 0.62 | 1.12 | 1.61 | 0.89 |
| Factor) | | | | |
| vWF (von Willebrand Factor) | 2.85 | 3.80 | 0.35 | 0.26 |

TABLE 25
Fold Change in Host Protein Expression Levels in Serum from Mice Bearing
GLV-1h68-treated, GLV-1h109-treated or Untreated A549 Human Lung
Carcinoma Xenograft Tumors

| | Fold change in protein levels | | | |
|---|---|---|---|---|
| | 1h68- | 1h109- | untreated | untreated |
| | treated | treated | A549/ | A549/ |
| | A549/ | A549/ | 1h68- | 1h109- |
| | untreated | untreated | treated | treated |
| Mouse Serum Protein | A549 | A549 | A549 | A549 |
| Apo A1 (Apolipoprotein A1) | 1.51 | 1.34 | 0.66 | 0.74 |
| CD40 | 2.41 | 0.71 | 0.42 | 1.41 |
| CD40 Ligand | 1.07 | 1.03 | 0.94 | 0.97 |
| CRP (C Reactive Protein) | 0.95 | 0.56 | 1.05 | 1.78 |
| EGF (Epidermal Growth Factor) | 0.68 | 0.68 | 1.47 | 1.47 |
| Endothelin-1 | — | — | — | — |
| Eotaxin | 1.25 | 1.18 | 0.80 | 0.84 |
| Factor VII | 0.99 | 0.81 | 1.01 | 1.24 |
| FGF-9 (Fibroblast Growth Factor-9) | — | — | — | — |
| FGF-basic (Fibroblast Growth Factor- | 0.60 | 0.83 | 1.66 | 1.21 |
| basic) | | | | |
| Fibrinogen | — | — | — | — |
| GCP-2 (Granulocyte Chemotactic Protein- | 0.92 | 0.76 | 1.09 | 1.32 |
| 2) | | | | |
| GM-CSF (Granulocyte Macrophage- | — | — | — | — |
| Colony Stimulating Factor) | | | | |
| GST-alpha (Glutathione S-Transferase | — | — | — | — |
| alpha) | | | | |
| Haptoglobin | 4.68 | 3.86 | 0.21 | 0.26 |
| IFN-gamma (Interferon-gamma) | 5.37 | — | 0.19 | — |
| IgA (Immunoglobulin A) | 0.66 | 0.53 | 1.51 | 1.90 |
| IL-10 (Interleukin-10) | 2.04 | 1.31 | 0.49 | 0.76 |
| IL-11 (Interleukin-11) | — | — | — | — |
| IL-12p70 (Interleukin-12p70) | 0.61 | — | 1.64 | — |
| IL-17 (Interleukin-17) | 2.12 | — | 0.47 | — |
| IL-18 (Interleukin-18) | 3.06 | 1.42 | 0.33 | 0.70 |
| IL-1alpha (Interleukin-1alpha) | 1.21 | 1.46 | 0.83 | 0.68 |
| IL-1beta (Interleukin-1beta) | 1.35 | 1.38 | 0.74 | 0.73 |
| IL-2 (Interleukin-2) | — | — | — | — |
| IL-3 (Interleukin-3) | — | — | — | — |
| IL-4 (Interleukin-4) | 4.76 | — | 0.21 | — |
| IL-5 (Interleukin-5) | 1.73 | 1.23 | 0.58 | 0.81 |
| IL-6 (Interleukin-6) | 10.43 | — | 0.10 | — |
| IL-7 (Interleukin-7) | 5.52 | 1.15 | 0.18 | 0.87 |
| IP-10 (Inducible Protein-10) | 10.07 | 3.71 | 0.10 | 0.27 |
| KC/GROalpha (Melanoma Growth | 1.27 | 0.54 | 0.79 | 1.86 |
| Stimulatory Activity Protein) | | | | |
| LIF (Leukemia Inhibitory Factor) | 1.12 | 1.06 | 0.89 | 0.94 |
| Lymphotactin | 1.65 | 0.68 | 0.61 | 1.46 |
| MCP-1 (Monocyte Chemoattractant | 4.33 | 1.22 | 0.23 | 0.82 |
| Protein-1) | | | | |
| MCP-3 (Monocyte Chemoattractant | 3.74 | 0.97 | 0.27 | 1.03 |
| Protein-3) | | | | |
| MCP-5 (Monocyte Chemoattractant | 4.85 | 1.83 | 0.21 | 0.55 |
| Protein-5) | | | | |
| M-CSF (Macrophage-Colony Stimulating | 1.05 | 0.71 | 0.95 | 1.40 |
| Factor) | | | | |
| MDC (Macrophage-Derived Chemokine) | 0.85 | 0.81 | 1.18 | 1.24 |
| MIP-1alpha (Macrophage Inflammatory | 1.25 | 0.74 | 0.80 | 1.34 |
| Protein-1alpha) | | | | |
| MIP-1beta (Macrophage Inflammatory | 7.01 | 3.71 | 0.14 | 0.27 |
| Protein-1beta) | | | | |
| MIP-1gamma (Macrophage Inflammatory | 1.53 | 0.87 | 0.65 | 1.15 |
| Protein-1gamma) | | | | |
| MIP-2 (Macrophage Inflammatory Protein- | 2.82 | 1.67 | 0.35 | 0.60 |
| 2) | | | | |
| MIP-3beta (Macrophage Inflammatory | 1.28 | 1.13 | 0.78 | 0.89 |
| Protein-3beta) | | | | |
| MMP-9 (Matrix Metalloproteinase-9) | 0.95 | 0.43 | 1.06 | 2.31 |
| MPO (Myeloperoxidase) | 0.99 | 0.69 | 1.01 | 1.45 |
| Myoglobin | 10.10 | 7.92 | 0.10 | 0.13 |
| OSM (Oncostatin M) | 2.29 | 1.45 | 0.44 | 0.69 |
| RANTES (Regulation Upon Activation, | 2.71 | 0.45 | 0.37 | 2.21 |
| Normal T-Cell Expressed and Secreted) | | | | |
| SAP (Serum Amyloid P) | 0.78 | 0.55 | 1.28 | 1.82 |
| SCF (Stem Cell Factor) | 2.39 | 1.23 | 0.42 | 0.81 |
| SGOT (Serum Glutamic-Oxaloacetic | 0.67 | 0.64 | 1.48 | 1.56 |
| Transaminase) | | | | |
| TIMP-1 (Tissue Inhibitor of | 3.75 | 0.82 | 0.27 | 1.22 |
| Metalloproteinase Type-1) | | | | |
| Tissue Factor | 0.97 | 0.85 | 1.03 | 1.17 |
| TNF-alpha (Tumor Necrosis Factor-alpha) | 1.85 | — | 0.54 | — |
| TPO (Thrombopoietin) | 1.59 | 1.45 | 0.63 | 0.69 |
| VCAM-1 (Vascular Cell Adhesion | 1.15 | 0.81 | 0.87 | 1.23 |
| Molecule-1) | | | | |
| VEGF (Vascular Endothelial Cell Growth | 2.34 | 4.60 | 0.43 | 0.22 |
| Factor) | | | | |
| vWF (von Willebrand Factor) | 1.20 | 0.97 | 0.83 | 1.03 |

### Example 14

### Identification of Tumor Proteins which are Differentially Expressed in Xenograft Tumors which Respond Favorably to Viral Therapy Using A549 Cells

[0334] To identify differentially expressed proteins in virus-infected tumors derived from cells known to respond favorably to viral therapy, A549 human tumor cells were implanted subcutaneously into nude mice (male or female). Once the tumors reached a desired size, (approximately 200-400 mm³), the mice were injected intravenously with 5×10⁶ pfu/100 μl PBS/mouse of vaccinia virus GLV-1h68 or GLV-1h109. Mice were sacrificed at 21 days after injection. Tumors were excised and prepared in Tris buffer. Human protein profiles were determined by Rules-Based Medicine, Inc. using the HumanMAP® multi-analyte profile immunoassay for tumors injected with GLV-1h68 or GLV-1h109 (treated), and non-injected control tumors (untreated). Table 26 shows fold change in protein expression levels of human proteins between treated and untreated tumors derived from A549 cells.

TABLE 26
Fold Change in Human Tumor Protein Expression Levels in
GLV-1h68-treated, GLV-1h109-treated, or Untreated A549
human Lung Carcinoma Xenograft Tumors

| | Fold change in protein level | | | |
|---|---|---|---|---|
| | 1h68- | 1h109- | untreated | untreated |
| | treated | treated | A549/ | A549/ |
| | A549/ | A549/ | 1h68- | 1h109- |
| | untreated | untreated | treated | treated |
| Human protein | A549 | A549 | A549 | A549 |
| Alpha-1 Antitrypsin | 0.40 | — | 2.48 | — |
| Adiponectin | — | — | — | — |
| Alpha-2 Macroglobulin | 1.15 | — | 0.87 | — |
| Alpha-Fetoprotein | 0.67 | 1.91 | 1.49 | 0.52 |
| Apolipoprotein A1 | — | — | — | — |
| Apolipoprotein CIII | — | — | — | — |
| Apolipoprotein H | 0.86 | — | 1.17 | — |
| Beta-2 Microglobulin | 0.03 | — | 31.88 | — |
| Brain-Derived | 1.64 | 0.68 | 0.61 | 1.47 |
| Neurotrophic Factor | | | | |
| Complement 3 | 0.60 | — | 1.68 | — |
| Cancer Antigen 125 | 0.62 | 0.13 | 1.61 | 7.53 |
| Cancer Antigen 19-9 | 0.82 | 0.73 | 1.21 | 1.38 |
| Calcitonin | 0.44 | 2.33 | 2.26 | 0.43 |
| CD40 | 1.38 | 0.79 | 0.73 | 1.27 |
| CD40 Ligand | 1.40 | 1.84 | 0.72 | 0.54 |
| Carcinoembryonic | — | — | — | — |
| Antigen | | | | |
| Creatine Kinase-MB | 1.35 | 15.91 | 0.74 | 0.06 |
| C Reactive Protein | 1.01 | 0.85 | 0.99 | 1.18 |
| EGF | 0.75 | 0.71 | 1.33 | 1.41 |
| ENA-78 | 3.78 | 1.25 | 0.26 | 0.80 |
| Endothelin-1 | 0.84 | 2.43 | 1.18 | 0.41 |
| EN-RAGE | — | — | — | — |
| Eotaxin | 1.29 | 2.60 | 0.78 | 0.38 |
| Erythropoietin | — | — | — | — |
| Fatty Acid Binding | 0.45 | 4.30 | 2.24 | 0.23 |
| Protein | | | | |
| Factor VII | 0.37 | 2.37 | 2.68 | 0.42 |
| Ferritin | 1.20 | — | 0.83 | — |
| FGF basic | 0.89 | 0.17 | 1.12 | 6.06 |
| Fibrinogen | 0.71 | — | 1.41 | — |
| G-CSF | 1.70 | 1.21 | 0.59 | 0.83 |
| Growth Hormone | 1.18 | 6.79 | 0.84 | 0.15 |
| GM-CSF | 1.48 | 1.95 | 0.68 | 0.51 |
| Glutathione | 1.17 | 5.46 | 0.85 | 0.18 |
| S-Transferase | | | | |
| Haptoglobin | — | — | — | — |
| ICAM-1 | 0.68 | 1.15 | 1.47 | 0.87 |
| IFN-gamma | — | — | — | — |
| IgA | — | — | — | — |
| IgE | — | — | — | — |
| IGF-1 | — | — | — | — |
| IgM | 0.18 | — | 5.48 | — |
| IL-10 | 0.98 | 2.00 | 1.02 | 0.50 |
| IL-12p40 | — | 7.59 | — | 0.13 |
| IL-12p70 | 0.78 | 6.03 | 1.28 | 0.17 |
| IL-13 | 0.90 | 4.65 | 1.11 | 0.22 |
| IL-15 | 0.95 | 8.48 | 1.05 | 0.12 |
| IL-16 | 1.78 | 15.72 | 0.56 | 0.06 |
| IL-18 | 0.94 | 0.14 | 1.07 | 7.26 |
| IL-1alpha | 4.37 | 4.60 | 0.23 | 0.22 |
| IL-1beta | 0.60 | 0.13 | 1.67 | 7.44 |
| IL-1ra | 0.87 | 0.81 | 1.15 | 1.23 |
| IL-2 | — | 11.23 | — | 0.09 |
| IL-3 | 1.63 | 5.11 | 0.61 | 0.20 |
| IL-4 | — | — | — | — |
| IL-5 | 1.18 | 2.95 | 0.85 | 0.34 |
| IL-6 | 0.98 | 0.54 | 1.02 | 1.86 |
| IL-7 | 0.98 | 2.65 | 1.02 | 0.38 |
| IL-8 | 1.22 | 0.63 | 0.82 | 1.59 |
| Insulin | — | — | — | — |
| Leptin | 1.07 | 4.26 | 0.93 | 0.23 |
| Lipoprotein (a) | 0.34 | — | 2.91 | — |
| Lymphotactin | — | — | — | — |
| MCP-1 | 1.74 | 7.59 | 0.58 | 0.13 |
| MDC | — | — | — | — |
| MIP-1alpha | 0.92 | 2.43 | 1.09 | 0.41 |
| MIP-1beta | 1.54 | 24.93 | 0.65 | 0.04 |
| MMP-2 | 0.53 | 1.62 | 1.90 | 0.62 |
| MMP-3 | — | — | — | — |
| MMP-9 | — | 6.83 | — | 0.15 |
| Myeloperoxidase | 4.49 | — | 0.22 | — |
| Myoglobin | — | — | — | — |
| PAI-1 | 0.72 | — | 1.38 | — |
| Prostatic Acid | 0.46 | 0.16 | 2.16 | 6.15 |
| Phosphatase | | | | |
| PAPP-A | 1.91 | 3.11 | 0.52 | 0.32 |
| Prostate Specific | — | 11.77 | — | 0.08 |
| Antigen, Free | | | | |
| RANTES | 19.03 | — | 0.05 | — |
| Serum Amyloid P | — | — | — | — |
| Stem Cell Factor | 0.92 | 1.13 | 1.08 | 0.88 |
| SGOT | 1.35 | 1.15 | 0.74 | 0.87 |
| SHBG | — | — | — | — |
| Thyroxine Binding | — | — | — | — |
| Globulin | | | | |
| Tissue Factor | 0.79 | 0.14 | 1.27 | 7.18 |
| TIMP-1 | 1.27 | — | 0.79 | — |
| TNF RII | 0.57 | — | 1.76 | — |
| TNF-alpha | 1.07 | 6.12 | 0.93 | 0.16 |
| TNF-beta | 1.07 | 3.96 | 0.93 | 0.25 |
| Thrombopoietin | 1.07 | 7.16 | 0.93 | 0.14 |
| Thyroid Stimulating | — | — | — | — |
| Hormone | | | | |
| VCAM-1 | 1.08 | | 0.93 | |
| VEGF | 0.70 | 0.07 | 1.43 | 13.56 |
| von Willebrand Factor | — | — | — | — |

### Example 15

### Specificity of HumanMAP Multi-Analyte Profile Immunoassay

[0335] To demonstrate the specificity of the human multi-analyte profile immunoassay, mouse mammary gland tumor 4T1 (ATCC Catalog No. CRL-2935) cells were seeded in a 60 mm dish at 5×10⁶ cells/dish. The following day, the medium was changed, and 24 hours later the supernatant was collected to determine antibody specificity using HumanMAP® and RodentMAP™ multi-analyte profile immunoassays carried out by Rules-Based Medicine, Inc. Table 27 shows the level of expression detected using RodentMAP™ or HumanMAP® multi-analyte profile immunoassays.

TABLE 27
Cross-reactivity of Expressed Mouse Tumor Proteins in
Rodent and Human Multi-analyte Profile Assays

| | | | | Cross |
|---|---|---|---|---|
| | | Rodent | Human | Reactivity |
| Antigen | | MAP | MAP | (%)* |
| Apolipoprotein A1 | mg/mL | 0 | 0.0 | — |
| CD40 | ng/mL | 0.063 | 0 | 0.0 |
| CD40 Ligand | ng/mL | 0 | 0 | — |
| C Reactive Protein | ug/mL | 0 | 0 | — |
| EGF | pg/mL | 4.0 | 2.7400 | 68.7 |
| Endothelin-1 | pg/mL | 9.4 | 13.2700 | 140.9 |
| Eotaxin | pg/mL | 5.6 | 6.3300 | 113.2 |
| Factor VII | ng/mL | 1.4 | 0 | 0.0 |
| FGF basic | pg/mL | 1400 | 0.0000 | 0.0 |
| Fibrinogen | mg/mL | 0.0 | 0 | — |
| GM-CSF | pg/mL | 3739.4 | 0 | 0.0 |
| GST-alpha | ng/ml | 0 | 0.0000 | — |
| Haptoglobin | mg/mL | 0.0 | 0 | — |
| IFN-gamma | pg/mL | 15.4 | 0 | 0.0 |
| IgA | mg/mL | 0.0 | 0 | — |
| IL-10 | pg/mL | 101.1 | 0.0000 | 0.0 |
| IL-12p70 | pg/mL | 100 | 0.0000 | 0.0 |
| IL-18 | pg/mL | 200 | 0.0000 | 0.0 |
| IL-1alpha | ng/mL | 2.8247 | 0 | 0.0 |
| IL-1beta | pg/mL | 1100 | 0.0210 | 0.0 |
| IL-2 | pg/mL | 6.0 | 2.1300 | 35.3 |
| IL-3 | ng/mL | 0.0028 | 0 | 0.0 |
| IL-4 | pg/mL | 8.8 | 0.0000 | 0.0 |
| IL-5 | pg/mL | 300 | 0 | 0.0 |
| IL-6 | pg/mL | 11 | 0 | 0.0 |
| IL-7 | pg/mL | 100 | 0.0000 | 0.0 |
| Lymphotactin | ng/mL | 0.0125 | 0 | 0.0 |
| MCP-1 | pg/mL | 1458.3 | 0 | 0.0 |
| MDC | pg/ml | 133.6 | 0 | 0.0 |
| MIP-1 alpha | pg/mL | 100 | 6.1000 | 6.3 |
| MIP-1 beta | pg/mL | 75.0 | 3.5600 | 4.7 |
| MMP-9 | ng/mL | 529 | 2.5000 | 0.5 |
| Myeloperoxidase | ng/mL | 0 | 0.2500 | — |
| Myoglobin | ng/mL | 0.12 | 0 | 0.0 |
| RANTES | ng/mL | 0.1028 | 0.5200 | 505.6 |
| Serum Amyloid P | ug/mL | 0 | 0 | — |
| Stem Cell Factor | pg/mL | 261.7 | 3.3000 | 1.3 |
| SGOT | ug/mL | 0 | 0.0000 | — |
| TIMP-1 | ng/ml | 9.2 | 0.0000 | 0.0 |
| Tissue Factor | ng/ml | 2.2 | 0.0000 | 0.0 |
| TNF-alpha | pg/mL | 100 | 0.0000 | 0.0 |
| Thrombopoietin | ng/mL | 5.0 | 0.0590 | 1.2 |
| VCAM-1 | ng/mL | 29 | 0.1600 | 0.6 |
| VEGF | pg/mL | 8964.5 | 1300.6000 | 14.5 |
| von Willebrand Factor | ug/mL | 3100 | 0.0000 | 0.0 |

*Cross reactivity = HumanMAP/RodentMAP * 100

### Example 16

### Identification of Differentially Expressed Tumor Proteins in Xenograft Tumor Cells which Respond Poorly to Viral Therapy Using HT29 Cells

[0336] To identify tumor proteins which are differentially expressed in tumor cells that respond poorly to viral therapy, HT29 human colorectal adenocarcinoma cells were implanted subcutaneously into nude mice (male or female). Once the tumors reached a desired size, (approximately 200-400 mm³), the mice were injected intravenously with 5×10⁶ pfu/100 μl PBS/mouse of vaccinia virus GLV-1h68. Mice were sacrificed at 21 days and 42 days post-injection. Tumors were excised and prepared in Tris buffer. Protein expression profiles were determined by Rules-Based Medicine, Inc. using the HumanMAP® multi-analyte profile immunoassay. Table 28 shows human tumor cell protein profiles for mice injected with GLV-1h68 (treated), and non-injected control tumors (untreated) at either 21 days and 42 days post-infection (n=2). The data is expressed as either Untreated/GLV-1h68-Treated or GLV-1h68-Treated/Untreated for Day 21 or Day 42 post-infection.

TABLE 28
Fold Change in Human Tumor Protein Expression Levels in GLV-1h68-treated
or Untreated HT29 Human Colorectal Adenocarcinoma Xenograft Tumors

| | Fold change in protein level | | | |
|---|---|---|---|---|
| | Day 21 | | Day 42 | |
| | GLV-1h68- | Untreated/ | GLV-1h68- | Untreated/ |
| | treated/ | GLV-1h68- | treated/ | GLV-1h68- |
| Human protein | untreated | treated | Untreated | treated |
| Alpha-1 Antitrypsin | — | — | — | — |
| Adiponectin | — | — | — | — |
| Alpha-2 Macroglobulin | 0.89 | 1.12 | 0.76 | 1.31 |
| Alpha-Fetoprotein | 1.00 | 1.00 | 0.89 | 1.13 |
| Apolipoprotein A1 | — | — | — | — |
| Apolipoprotein CIII | — | — | — | — |
| Apolipoprotein H | — | — | — | — |
| Beta-2 Microglobulin | 1.05 | 0.95 | 0.96 | 1.04 |
| Brain-Derived | 2.37 | 0.42 | 0.49 | 2.04 |
| Neurotrophic Factor | | | | |
| Complement 3 | — | — | — | — |
| Cancer Antigen 125 | 1.67 | 0.60 | 1.27 | 0.79 |
| Cancer Antigen 19-9 | — | — | — | — |
| Calcitonin | — | — | — | — |
| CD40 | 0.89 | 1.12 | 1.65 | 0.60 |
| CD40 Ligand | 0.63 | 1.59 | 1.55 | 0.65 |
| Carcinoembryonic Antigen | 1.09 | 0.92 | 0.62 | 1.63 |
| Creatine Kinase-MB | 0.95 | 1.05 | 0.80 | 1.26 |
| C Reactive Protein | — | — | 0.93 | 1.07 |
| EGF | 1.38 | 0.73 | 1.20 | 0.83 |
| ENA-78 | 0.98 | 1.02 | 1.16 | 0.86 |
| Endothelin-1 | 0.97 | 1.03 | 0.89 | 1.13 |
| EN-RAGE | — | — | — | — |
| Eotaxin | 0.80 | 1.26 | 0.86 | 1.16 |
| Erythropoietin | 0.90 | 1.11 | 1.15 | 0.87 |
| Fatty Acid Binding Protein | 1.20 | 0.83 | 0.74 | 1.35 |
| Factor VII | 1.35 | 0.74 | 0.67 | 1.49 |
| Ferritin | 1.29 | 0.78 | 0.71 | 1.40 |
| FGF basic | 1.93 | 0.52 | 1.24 | 0.81 |
| Fibrinogen | — | — | — | — |
| G-CSF | 1.17 | 0.86 | 1.10 | 0.91 |
| Growth Hormone | 0.85 | 1.18 | 1.11 | 0.90 |
| GM-CSF | 1.16 | 0.86 | 0.70 | 1.43 |
| Glutathione S-Transferase | 0.87 | 1.15 | 1.12 | 0.89 |
| Haptoglobin | — | — | — | — |
| ICAM-1 | 1.08 | 0.93 | 1.02 | 0.98 |
| IFN-gamma | 1.18 | 0.85 | 1.57 | 0.64 |
| IgA | — | — | — | — |
| IgE | — | — | — | — |
| IGF-1 | — | — | — | — |
| IgM | — | — | — | — |
| IL-10 | 0.87 | 1.14 | 1.25 | 0.80 |
| IL-12p40 | 1.14 | 0.88 | 1.24 | 0.81 |
| IL-12p70 | 1.08 | 0.93 | 1.10 | 0.91 |
| IL-13 | 0.92 | 1.09 | 1.33 | 0.75 |
| IL-15 | 0.91 | 1.10 | 0.79 | 1.26 |
| IL-16 | 1.20 | 0.83 | 2.40 | 0.42 |
| IL-18 | 1.24 | 0.80 | 1.68 | 0.60 |
| IL-1 alpha | 0.70 | 1.42 | 1.49 | 0.67 |
| IL-1 beta | 0.31 | 3.24 | 0.26 | 3.81 |
| IL-1 ra | — | — | — | — |
| IL-2 | 1.01 | 0.99 | — | — |
| IL-3 | 1.72 | 0.58 | 1.38 | 0.73 |
| IL-4 | — | — | — | — |
| IL-5 | 1.20 | 0.83 | 0.68 | 1.47 |
| IL-6 | 3.65 | 0.27 | 3.90 | 0.26 |
| IL-7 | 0.89 | 1.12 | 1.07 | 0.93 |
| IL-8 | 0.95 | 1.05 | 1.42 | 0.71 |
| Insulin | — | — | — | — |
| Leptin | 0.78 | 1.28 | 0.72 | 1.40 |
| Lipoprotein (a) | — | — | — | — |
| Lymphotactin | — | — | — | — |
| MCP-1 | 0.07 | 13.55 | 0.17 | 5.99 |
| MDC | 0.46 | 2.16 | 1.50 | 0.67 |
| MIP-1 alpha | 1.05 | 0.96 | 0.83 | 1.20 |
| MIP-1 beta | 1.10 | 0.91 | — | — |
| MMP-2 | 0.91 | 1.10 | 1.02 | 0.98 |
| MMP-3 | 0.39 | 2.59 | 0.53 | 1.89 |
| MMP-9 | 2.06 | 0.49 | — | — |
| Myeloperoxidase | 1.62 | 0.62 | 0.85 | 1.18 |
| Myoglobin | — | — | — | — |
| PAI-1 | 0.78 | 1.28 | 1.46 | 0.69 |
| Prostatic Acid | 1.85 | 0.54 | 0.61 | 1.64 |
| Phosphatase | | | | |
| PAPP-A | — | — | — | — |
| Prostate Specific Antigen, | 1.14 | 0.88 | 0.30 | 3.38 |
| Free | | | | |
| RANTES | 0.06 | 17.63 | 0.11 | 9.27 |
| Serum Amyloid P | — | — | — | — |
| Stem Cell Factor | 0.93 | 1.08 | 0.91 | 1.10 |
| SGOT | 0.90 | 1.11 | 0.89 | 1.13 |
| SHBG | 1.98 | 0.51 | 0.64 | 1.57 |
| Thyroxine Binding | — | — | — | — |
| Globulin | | | | |
| Tissue Factor | 1.10 | 0.91 | 0.72 | 1.38 |
| TIMP-1 | 1.12 | 0.89 | 0.95 | 1.05 |
| TNF RII | 1.21 | 0.82 | 1.00 | 1.00 |
| TNF-alpha | 0.46 | 2.15 | 1.22 | 0.82 |
| TNF-beta | 0.98 | 1.02 | 1.44 | 0.70 |
| Thrombopoietin | 0.91 | 1.09 | 0.80 | 1.25 |
| Thyroid Stimulating Hormone | 0.40 | 2.47 | — | — |
| VCAM-1 | 0.50 | 2.02 | 1.02 | 0.98 |
| VEGF | 0.99 | 1.01 | 1.05 | 0.95 |
| von Willebrand Factor | 0.88 | 1.14 | 1.19 | 0.84 |

### Example 17

### Identification of Differentially Expressed Tumor Proteins in Xenograft Tumors which Respond Poorly to Viral Therapy Using HT-29 Cells

[0337] To identify host proteins which are differentially expressed in hosts that respond poorly to viral therapy, HT-29 human colorectal adenocarcinoma cells were implanted subcutaneously into nude mice (male or female). Once the tumors reached a desired size, (approximately 200-400 mm³), the mice were injected intravenously with 5×10⁶ pfu/100 μl PBS/mouse of vaccinia virus GLV-1h68. Mice were sacrificed at 21 days and 42 days post-injection. Tumors were excised and prepared in Tris buffer. Protein expression profiles were determined by Rules-Based Medicine, Inc. using the RodentMAP™ multi-analyte profile immunoassay. Table 29 shows host protein profiles for tumors injected with GLV-1h68 (treated), and non-injected control tumors (untreated), with the fold change in mouse protein levels between tumors injected with virus, and tumors non-injected with virus at 21 days and 42 days post-injection (n=2).

TABLE 29
Fold Change in Mouse Tumor Protein Expression Levels in GLV-1h68-treated
or Untreated HT29 Human Colorectal Adenocarcinoma Xenograft Tumors

| | Fold change in protein levels | | | |
|---|---|---|---|---|
| | Day 21 | | Day 42 | |
| | GLV-1h68- | Untreated/ | GLV-1h68- | Untreated/ |
| | treated/ | GLV-1h68- | treated/ | GLV-1h68- |
| Mouse protein | Untreated | treated | Untreated | treated |
| Apo A1 (Apolipoprotein A1) | 0.91 | 1.10 | 1.02 | 0.98 |
| CD40 | 0.92 | 1.09 | 1.67 | 0.60 |
| CD40 Ligand | 0.99 | 1.01 | 1.18 | 0.84 |
| CRP (C Reactive Protein) | 0.91 | 1.10 | 1.11 | 0.90 |
| EGF (Epidermal Growth | 2.07 | 0.48 | 1.24 | 0.81 |
| Factor) | | | | |
| Endothelin-1 | 0.84 | 1.19 | 1.22 | 0.82 |
| Eotaxin | 2.45 | 0.41 | 7.78 | 0.13 |
| Factor VII | 1.36 | 0.74 | 0.88 | 1.14 |
| FGF-9 (Fibroblast Growth | 1.22 | 0.82 | 0.64 | 1.57 |
| Factor-9) | | | | |
| FGF-basic (Fibroblast | 2.24 | 0.45 | 0.78 | 1.28 |
| Growth Factor-basic) | | | | |
| Fibrinogen | 1.50 | 0.67 | 0.79 | 1.26 |
| GCP-2 (Granulocyte | 1.31 | 0.76 | 1.85 | 0.54 |
| Chemotactic Protein-2) | | | | |
| GM-CSF (Granulocyte | 0.49 | 2.03 | 4.73 | 0.21 |
| Macrophage-Colony | | | | |
| Stimulating Factor) | | | | |
| GST-alpha (Glutathione S- | 0.75 | 1.34 | 0.50 | 2.00 |
| Transferase alpha) | | | | |
| Haptoglobin | 0.93 | 1.08 | 1.36 | 0.74 |
| IFN-gamma (Interferon- | 0.89 | 1.13 | 2.26 | 0.44 |
| gamma) | | | | |
| IgA (Immunoglobulin A) | 0.75 | 1.34 | 0.82 | 1.21 |
| IL-10 (Interleukin-10) | 0.68 | 1.46 | 1.00 | 1.00 |
| IL-11 (Interleukin-11) | 0.46 | 2.18 | 2.28 | 0.44 |
| IL-12p70 (Interleukin- | 0.51 | 1.98 | 1.01 | 0.99 |
| 12p70) | | | | |
| IL-17 (Interleukin-17) | 0.71 | 1.41 | 1.91 | 0.52 |
| IL-18 (Interleukin-18) | 2.61 | 0.38 | 10.80 | 0.09 |
| IL-1 alpha (Interleukin-1 | 0.61 | 1.65 | 0.94 | 1.07 |
| alpha) | | | | |
| IL-1 beta (Interleukin-1 | 0.39 | 2.59 | 0.79 | 1.27 |
| beta) | | | | |
| IL-2 (Interleukin-2) | 1.17 | 0.85 | 1.57 | 0.64 |
| IL-3 (Interleukin-3) | 0.48 | 2.08 | 1.08 | 0.93 |
| IL-4 (Interleukin-4) | 0.67 | 1.49 | 1.20 | 0.83 |
| IL-5 (Interleukin-5) | 0.45 | 2.22 | 0.74 | 1.35 |
| IL-6 (Interleukin-6) | 1.39 | 0.72 | 2.72 | 0.37 |
| IL-7 (Interleukin-7) | 0.34 | 2.92 | 1.04 | 0.96 |
| IP-10 (Inducible Protein-10) | 2.55 | 0.39 | 7.94 | 0.13 |
| KC/GRO alpha (Melanoma | 1.23 | 0.82 | 1.10 | 0.91 |
| Growth Stimulatory Activity | | | | |
| Protein) | | | | |
| LIF (Leukemia Inhibitory | 0.41 | 2.43 | 1.23 | 0.81 |
| Factor) | | | | |
| Lymphotactin | 0.23 | 4.42 | 1.27 | 0.79 |
| MCP-1 (Monocyte | 1.45 | 0.69 | 4.89 | 0.20 |
| Chemoattractant Protein-1) | | | | |
| MCP-3 (Monocyte | 1.29 | 0.78 | 4.07 | 0.25 |
| Chemoattractant Protein-3) | | | | |
| MCP-5 (Monocyte | 4.99 | 0.20 | 14.33 | 0.07 |
| Chemoattractant Protein-5) | | | | |
| M-CSF (Macrophage- | 1.04 | 0.96 | 1.46 | 0.68 |
| Colony Stimulating Factor) | | | | |
| MDC (Macrophage-Derived | 1.27 | 0.78 | 3.67 | 0.27 |
| Chemokine) | | | | |
| MIP-1 alpha (Macrophage | 0.64 | 1.57 | 0.72 | 1.39 |
| Inflammatory Protein-1 | | | | |
| alpha) | | | | |
| MIP-1 beta (Macrophage | 0.66 | 1.52 | 2.25 | 0.45 |
| Inflammatory Protein-1 | | | | |
| beta) | | | | |
| MIP-1gamma (Macrophage | 0.00 | 275.32 | 0.01 | 122.46 |
| Inflammatory Protein- | | | | |
| 1gamma) | | | | |
| MIP-2 (Macrophage | 0.93 | 1.08 | 1.76 | 0.57 |
| Inflammatory Protein-2) | | | | |
| MIP-3 beta (Macrophage | 0.93 | 1.07 | 1.09 | 0.92 |
| Inflammatory Protein-3 | | | | |
| beta) | | | | |
| MMP-9 (Matrix | 0.80 | 1.25 | 1.22 | 0.82 |
| Metalloproteinase-9) | | | | |
| MPO (Myeloperoxidase) | 1.42 | 0.71 | 2.33 | 0.43 |
| Myoglobin | — | — | — | — |
| OSM (Oncostatin M) | 0.47 | 2.14 | 0.84 | 1.19 |
| RANTES (Regulation Upon | 0.64 | 1.56 | 1.47 | 0.68 |
| Activation, Normal T-Cell | | | | |
| Expressed and Secreted) | | | | |
| SAP (Serum Amyloid P) | 0.90 | 1.11 | 1.13 | 0.89 |
| SCF (Stem Cell Factor) | 0.65 | 1.54 | 1.15 | 0.87 |
| SGOT (Serum Glutamic- | 0.91 | 1.09 | 1.16 | 0.86 |
| Oxaloacetic Transaminase) | | | | |
| TIMP-1 (Tissue Inhibitor of | 0.81 | 1.24 | 1.89 | 0.53 |
| Metalloproteinase Type-1) | | | | |
| Tissue Factor | 1.17 | 0.86 | 0.89 | 1.12 |
| TNF-alpha (Tumor | 0.37 | 2.72 | 0.80 | 1.25 |
| Necrosis Factor-alpha) | | | | |
| TPO (Thrombopoietin) | 0.68 | 1.48 | 0.83 | 1.21 |
| VCAM-1 (Vascular Cell | 0.96 | 1.04 | 1.40 | 0.72 |
| Adhesion Molecule-1) | | | | |
| VEGF (Vascular | 0.58 | 1.72 | 1.20 | 0.84 |
| Endothelial Cell Growth | | | | |
| Factor) | | | | |
| vWF (von Willebrand | 0.99 | 1.01 | 1.09 | 0.92 |
| Factor) | | | | |

### Example 18

### Comparison of Expression Levels in Different Tumors

[0338] The level of expression of one or more markers in a biological sample may be compared to the level of expression in biological samples known to respond favorably or poorly to viral therapy. For example, the level of expression of one or more markers in a tumor obtained from a subject can be compared to the level of expression in tumors known to respond favorably or poorly to viral therapy. An example of one method for comparing expression levels is described below.

| | |
|---|---|
| Weight of exemplary tumor sample A: | 500 mg |
| Weight of exemplary tumor sample B: | 600 mg |
| Weight of exemplary tumor sample C: | 550 mg |

[0339] All tumors are ground in a volume of Tris buffer (e.g., 1000 ul Tris buffer, pH 7.4, with protease inhibitors added).

[0340] Assuming 1 mg=1 ul, the tumor sample concentration for sample A is therefore=(500 mg)/(500 ul+1000 ul)=0.333 mg/ul

[0341] Similarly, for tumor sample B, the tumor sample concentration is (600 mg)/(600 ul+1000 ul)=0.375 mg/ul

[0342] Similarly, for tumor sample C, the tumor sample concentration is (550 mg)/(550 ul+1000 ul)=0.355 mg/ul

[0343] When the raw data of protein antigens (in concentration) is obtained, it may be adjusted to the tumor sample concentration. For example, if the raw data for protein K is, for example, 0.34 ng/ml, 0.55 ng/ml, and 0.39 ng/ml, for tumor samples A, B, and C, respectively, the relative concentration of protein K can be adjusted according the tumor sample concentration. Since tumor sample B is 0.375/0.333=1.072 fold higher than sample A, the concentration of antigen K for sample A is adjusted by calculating: 0.34 ng/ml×1.072=0.36 ng/ml. The concentration of antigen K for sample C may be adjusted by calculating: 0.39 ng/ml×(0.375/0.355)=0.41 ng/ml.

[0344] The adjusted data for the concentration of protein antigen K is 0.36 ng/ml, 0.55 ng/ml, 0.41 ng/ml for tumor sample A, B, C, respectively. After this concentration adjustment, the samples can be directly compared to identify those markers that are elevated and those markers that are decreased and the fold differences among them.

### Example 19

### Efficacy of GLV-1h68 Replication in Additional Tumor Cell Lines

[0345] A panel of well-characterized human cancer cell lines of different histological derivation was employed in the studies described herein. All cell lines except noted were purchased from American Type Culture Collection (Manassas).

[0346] NCI-H460 lung large cell carcinoma (ATCC Cat No. HTB-177), MALME-3M malignant melanoma lung metastasis (ATCC Cat No. HTB-64), RXF-393 renal hypernephroma (National Cancer Institute Repository), NCI-H522 lung adenocarcinoma (ATCC Cat No. CRL-5810), NCI-H322M lung bronchi alveolar carcinoma (National Cancer Institute Repository), NCI-H226 lung squamous cell carcinoma (ATCC Cat No. CRL-5826), NCI-H23 lung adenocarcinoma (ATCC Cat No. CRL-5800), HOP-92 lung carcinoma (National Cancer Institute Repository), and EKVX lung adenocarcinoma (National Cancer Institute Repository) cells were cultured in Roswell Park Memorial Institute medium (RPMI) supplemented with 10% FBS. A-673 rhabdomyosarcoma (ATCC Cat No. CRL-1598) and D283/MED medulloblastoma (ATCC Cat No. HTB-185) cells were cultured in Eagle's minimal essential medium (EMEM) media supplemented with 10% FBS. MNNG/HOS osteosarcoma (ATCC Cat No. CRL-1547) cells were cultured in EMEM supplemented with 10% FBS, non-essential amino acids (NEAA) and sodium pyruvate. All cell cultures were carried out at 37° C. under 5% CO₂.

[0347] Cells were seeded in 24-well plates and were infected individually with GLV-1h68, LIVP or WR at a MOI of 0.01 as described in Zhang, Q. et al. (2007) Cancer Res 67:10038-10046. Cells were harvested at various time points up to 72 hours post infection (h.p.i.). Viral titers in the cell samples were determined as pfu/ml of medium in duplicates by standard plaque assays in CV-1 cell cultures. Data is shown in Tables 30A-30L for viral titers as 1, 24, 48 and 72 hours post infection.

TABLE 30A
Viral titer values for NCI-H460

| | LIVP Average | Standard | WR | | GLV-1h68 | |
|---|---|---|---|---|---|---|
| | Viral | Deviation | Average | Standard | Average | Standard |
| Hours | Titer | (Log | Viral Titer | Deviation | Viral Titer | Deviation |
| Post | (Log pfu/ | pfu/10⁶ | (Log pfu/ | (Log pfu/ | (Log pfu/ | (Log pfu/ |
| Infection | 10⁶ cells) | cells) | 10⁶ cells | 10⁶ cells) | 10⁶ cells) | 10⁶ cells) |
| 1 | 4.25 | 0.04 | 4.13 | 0.06 | 3.33 | 0.17 |
| 24 | 6.52 | 0.08 | 6.30 | 0.03 | 5.67 | 0.04 |
| 48 | 7.29 | 0.07 | 7.06 | 0.03 | 6.31 | 0.32 |
| 72 | 7.56 | 0.22 | 7.48 | 0.17 | 6.74 | 0.10 |

TABLE 30B
Viral titer values for MALME-3M

| | LIVP Average | Standard | WR | | GLV-1h68 | |
|---|---|---|---|---|---|---|
| | Viral | Deviation | Average | Standard | Average | Standard |
| Hours | Titer | (Log | Viral Titer | Deviation | Viral Titer | Deviation |
| Post | (Log pfu/ | pfu/10⁶ | (Log pfu/ | (Log pfu/ | (Log pfu/ | (Log pfu/ |
| Infection | 10⁶ cells) | cells) | 10⁶ cells | 10⁶ cells) | 10⁶ cells) | 10⁶ cells) |
| 1 | 3.64 | 0.03 | 3.67 | 0.14 | 2.77 | 0.30 |
| 24 | 7.24 | 0.10 | 7.40 | 0.13 | 5.54 | 0.02 |
| 48 | 7.59 | 0.07 | 7.56 | 0.05 | 6.84 | 0.09 |
| 72 | 7.61 | 0.11 | 7.57 | 0.04 | 7.20 | 0.11 |

TABLE 30C
Viral titer values for RXF-393

| | LIVP Average | Standard | WR | | GLV-1h68 | |
|---|---|---|---|---|---|---|
| | Viral | Deviation | Average | Standard | Average | Standard |
| Hours | Titer | (Log | Viral Titer | Deviation | Viral Titer | Deviation |
| Post | (Log pfu/ | pfu/10⁶ | (Log pfu/ | (Log pfu/ | (Log pfu/ | (Log pfu/ |
| Infection | 10⁶ cells) | cells) | 10⁶ cells | 10⁶ cells) | 10⁶ cells) | 10⁶ cells) |
| 1 | 4.11 | 0.04 | 4.22 | 0.02 | 3.30 | 0.08 |
| 24 | 6.94 | 0.08 | 6.87 | 0.03 | 5.60 | 0.02 |
| 48 | 7.34 | 0.03 | 7.25 | 0.16 | 6.65 | 0.11 |
| 72 | 7.05 | 0.18 | 7.31 | 0.18 | 7.19 | 0.11 |

TABLE 30D
Viral titer values for NCI-H522

| | LIVP Average | Standard | WR | | GLV-1h68 | |
|---|---|---|---|---|---|---|
| | Viral | Deviation | Average | Standard | Average | Standard |
| Hours | Titer | (Log | Viral Titer | Deviation | Viral Titer | Deviation |
| Post | (Log pfu/ | pfu/10⁶ | (Log pfu/ | (Log pfu/ | (Log pfu/ | (Log pfu/ |
| Infection | 10⁶ cells) | cells) | 10⁶ cells | 10⁶ cells) | 10⁶ cells) | 10⁶ cells) |
| 1 | 4.25 | 0.17 | 4.13 | 0.21 | 3.07 | 0.32 |
| 24 | 6.83 | 0.10 | 6.47 | 0.16 | 5.58 | 0.09 |
| 48 | 7.72 | 0.06 | 7.21 | 0.29 | 7.34 | 0.14 |
| 72 | 7.76 | 0.05 | 7.46 | 0.11 | 7.53 | 0.05 |

TABLE 30E
Viral titer values for NCI-H322M

| | LIVP Average | Standard | WR | | GLV-1h68 | |
|---|---|---|---|---|---|---|
| | Viral | Deviation | Average | Standard | Average | Standard |
| Hours | Titer | (Log | Viral Titer | Deviation | Viral Titer | Deviation |
| Post | (Log pfu/ | pfu/10⁶ | (Log pfu/ | (Log pfu/ | (Log pfu/ | (Log pfu/ |
| Infection | 10⁶ cells) | cells) | 10⁶ cells | 10⁶ cells) | 10⁶ cells) | 10⁶ cells) |
| 1 | 3.81 | 0.14 | 3.81 | 0.05 | 3.11 | 0.14 |
| 24 | 6.00 | 0.04 | 5.47 | 0.10 | 4.30 | 0.05 |
| 48 | 6.61 | 0.06 | 5.74 | 0.07 | 4.47 | 0.07 |
| 72 | 6.71 | 0.09 | 5.88 | 0.11 | 4.49 | 0.05 |

TABLE 30F
Viral titer values for NCI-H226

| | LIVP Average | Standard | WR | | GLV-1h68 | |
|---|---|---|---|---|---|---|
| | Viral | Deviation | Average | Standard | Average | Standard |
| Hours | Titer | (Log | Viral Titer | Deviation | Viral Titer | Deviation |
| Post | (Log pfu/ | pfu/10⁶ | (Log pfu/ | (Log pfu/ | (Log pfu/ | (Log pfu/ |
| Infection | 10⁶ cells) | cells) | 10⁶ cells | 10⁶ cells) | 10⁶ cells) | 10⁶ cells) |
| 1 | 3.94 | 0.08 | 3.34 | 0.05 | 3.12 | 0.02 |
| 24 | 6.86 | 0.13 | 5.81 | 0.06 | 5.23 | 0.06 |
| 48 | 8.00 | 0.15 | 7.55 | 0.21 | 6.32 | 0.16 |
| 72 | 8.28 | 0.17 | 7.72 | 0.14 | 7.37 | 0.17 |

TABLE 30G
Viral titer values for NCI-H23

| | LIVP Average | Standard | WR | | GLV-1h68 | |
|---|---|---|---|---|---|---|
| | Viral | Deviation | Average | Standard | Average | Standard |
| Hours | Titer | (Log | Viral Titer | Deviation | Viral Titer | Deviation |
| Post | (Log pfu/ | pfu/10⁶ | (Log pfu/ | (Log pfu/ | (Log pfu/ | (Log pfu/ |
| Infection | 10⁶ cells) | cells) | 10⁶ cells | 10⁶ cells) | 10⁶ cells) | 10⁶ cells) |
| 1 | 3.99 | 0.13 | 3.82 | 0.17 | 3.14 | 0.12 |
| 24 | 6.97 | 0.19 | 7.06 | 0.07 | 6.24 | 0.09 |
| 48 | 7.24 | 0.16 | 7.11 | 0.11 | 6.98 | 0.20 |
| 72 | 7.18 | 0.22 | 7.09 | 0.21 | 7.14 | 0.12 |

TABLE 30H
Viral titer values for HOP-92

| | LIVP Average | Standard | WR | | GLV-1h68 | |
|---|---|---|---|---|---|---|
| | Viral | Deviation | Average | Standard | Average | Standard |
| Hours | Titer | (Log | Viral Titer | Deviation | Viral Titer | Deviation |
| Post | (Log pfu/ | pfu/10⁶ | (Log pfu/ | (Log pfu/ | (Log pfu/ | (Log pfu/ |
| Infection | 10⁶ cells) | cells) | 10⁶ cells | 10⁶ cells) | 10⁶ cells) | 10⁶ cells) |
| 1 | 4.85 | 0.04 | 4.63 | 0.09 | 3.75 | 0.12 |
| 24 | 6.88 | 0.20 | 7.07 | 0.11 | 4.93 | 0.12 |
| 48 | 7.70 | 0.14 | 7.49 | 0.07 | 6.58 | 0.04 |
| 72 | 7.90 | 0.07 | 7.65 | 0.17 | 7.17 | 0.06 |

TABLE 30I
Viral titer values for EKVX

| | LIVP Average | Standard | WR | | GLV-1h68 | |
|---|---|---|---|---|---|---|
| | Viral | Deviation | Average | Standard | Average | Standard |
| Hours | Titer | (Log | Viral Titer | Deviation | Viral Titer | Deviation |
| Post | (Log pfu/ | pfu/10⁶ | (Log pfu/ | (Log pfu/ | (Log pfu/ | (Log pfu/ |
| Infection | 10⁶ cells) | cells) | 10⁶ cells | 10⁶ cells) | 10⁶ cells) | 10⁶ cells) |
| 1 | 4.15 | 0.16 | 4.13 | 0.01 | 3.23 | 0.08 |
| 24 | 7.39 | 0.02 | 7.38 | 0.20 | 6.13 | 0.39 |
| 48 | 7.58 | 0.03 | 7.57 | 0.16 | 7.06 | 0.08 |
| 72 | 7.53 | 0.05 | 7.52 | 0.04 | 7.15 | 0.18 |

TABLE 30J
Viral titer values for A-673

| | GLV-1h68 | |
|---|---|---|
| | Average | Standard |
| Hours | Viral Titer | Deviation |
| Post | (Log pfu/ | (Log pfu/ |
| Infection | 10⁶ cells) | 10⁶ cells) |
| 1 | 3.26 | 0.07 |
| 24 | 4.38 | 0.36 |
| 48 | 5.66 | 0.14 |
| 72 | 6.20 | 0.01 |

TABLE 30K
Viral titer values for D283/MED

| | GLV-1h68 | |
|---|---|---|
| | Average | Standard |
| Hours | Viral Titer | Deviation |
| Post | (Log pfu/ | (Log pfu/ |
| Infection | 10⁶ cells) | 10⁶ cells) |
| 1 | 2.48 | 0.24 |
| 24 | 3.66 | 0.16 |
| 48 | 4.27 | 0.29 |
| 72 | 4.61 | 0.04 |

TABLE 30L
Viral titer values for MNNG/HOS

| | GLV-1h68 | |
|---|---|---|
| | Average | Standard |
| Hours | Viral Titer | Deviation |
| Post | (Log pfu/ | (Log pfu/ |
| Infection | 10⁶ cells) | 10⁶ cells) |
| 1 | 3.49 | 0.07 |
| 24 | 6.48 | 0.20 |
| 48 | 7.58 | 0.03 |
| 72 | 7.46 | 0.08 |

[0348] The cell lines were divided into groups of predicted responders and non-responders based on the ability of the virus to exhibit significant replication within the cells within 24 hours post infection. Cell types that exhibited an approximate 3-fold or greater increase in viral titer over input titer were designated as in vitro responders. Table 31 displays the fold increase in viral titer between consecutive time points.

TABLE 31
Predicted Responders and Non-responders based on in
vitro replication assays

| | | Fold Increase | | |
|---|---|---|---|---|
| | | 24 h.p.i./ | 48 h.p.i./ | 72 h.p.i./ |
| | Cell Line | input | 24 h.p.i. | 48 h.p.i. |
| In vitro | A-673 | 3.01 | 15.77 | 3.36 |
| responders | EKVX | 167.06 | 6.94 | 1.30 |
| | HOP-92 | 8.82 | 43.29 | 3.92 |
| | MALME-3M | 34.46 | 20.20 | 2.33 |
| | MNNG/HOS | 327.27 | 11.57 | 0.77 |
| | NCI-H23 | 176.39 | 5.83 | 1.36 |
| | NCI-H226 | 16.94 | 12.79 | 11.41 |
| | NCI-H460 | 47.04 | 5.08 | 2.36 |
| | NCI-H522 | 38.89 | 58.57 | 1.51 |
| | RXF-393 | 40.24 | 11.26 | 3.45 |
| In vitro non- | D283/MED | 0.48 | 4.44 | 1.93 |
| responders | NCI-H322M | 2.01 | 1.48 | 1.05 |

h.p.i. = hours post viral infection

### Example 20

### Comparison of Expression Levels in Between Untreated Tumors

[0349] In order to determine whether there were similarities in basal gene expression levels among tumors that respond favorably to viral therapy versus tumors that respond poorly to viral therapy, the expression profiles in untreated tumors were compared. The data from the experiments described in Examples 9 and 10 were used for the comparison. Table 32 shows the ratios of proteins that are expressed HT-29 tumor cells, which are poor responders, versus A549 or PANC-1 tumor cells, which respond favorably to tumor therapy.

TABLE 32
Fold Difference in Human Protein Expression Levels in
HT29 (Poor Responder) versus A549 or PANC-1
(Responder) Tumor Cells

| | Fold difference in protein levels | | | |
|---|---|---|---|---|
| | HT-29/ | HT-29/ | A549/ | PANC-1/ |
| Human Protein | A549 | PANC-1 | HT-29 | HT-29 |
| Alpha-2 | 0.71 | 1.10 | 1.41 | 0.91 |
| Macroglobulin | | | | |
| Alpha-Fetoprotein | 0.77 | 0.68 | 1.30 | 1.47 |
| Beta-2 Microglobulin | 25.88 | 583.57 | 0.04 | 0.00 |
| Brain-Derived | 5.18 | 38.75 | 0.19 | 0.03 |
| Neurotrophic Factor | | | | |
| Cancer Antigen 125 | 0.04 | 0.70 | 22.24 | 1.43 |
| Cancer Antigen 19-9 | 1050.50 | 1536.20 | 0.00 | 0.00 |
| Calcitonin | 0.98 | 1.36 | 1.02 | 0.73 |
| CD40 | 0.05 | 0.00 | 18.34 | 301.60 |
| CD40 Ligand | 1.27 | 0.14 | 0.79 | 7.33 |
| Creatine Kinase-MB | 5.80 | 0.87 | 0.17 | 1.15 |
| C Reactive Protein | 5.32 | 2.67 | 0.19 | 0.37 |
| EGF | 32.79 | 9.92 | 0.03 | 0.10 |
| ENA-78 | 0.00 | 0.11 | 591.03 | 8.96 |
| Endothelin-1 | 3.03 | 1.88 | 0.33 | 0.53 |
| Eotaxin | 0.83 | 0.81 | 1.20 | 1.23 |
| Fatty Acid Binding | 66.05 | 30.41 | 0.02 | 0.03 |
| Protein | | | | |
| Factor VII | 2.03 | 3.66 | 0.49 | 0.27 |
| Ferritin | 0.34 | 1.01 | 2.96 | 0.99 |
| FGF basic | 0.27 | 1.54 | 3.64 | 0.65 |
| G-CSF | 0.80 | 0.83 | 1.25 | 1.21 |
| Growth Hormone | 4.94 | 2.77 | 0.20 | 0.36 |
| GM-CSF | 8.74 | 16.60 | 0.11 | 0.06 |
| Glutathione S- | 1.69 | 0.83 | 0.59 | 1.20 |
| Transferase | | | | |
| ICAM-1 | 33.36 | 1.64 | 0.03 | 0.61 |
| IL-10 | 1.38 | 1.68 | 0.73 | 0.60 |
| IL-12p40 | 3.44 | 0.49 | 0.29 | 2.03 |
| IL-12p70 | 2.18 | 0.73 | 0.46 | 1.38 |
| IL-13 | 1.99 | 1.27 | 0.50 | 0.79 |
| IL-15 | 1.39 | 0.48 | 0.72 | 2.09 |
| IL-16 | 0.93 | 0.04 | 1.07 | 25.10 |
| IL-18 | 0.23 | 1.96 | 4.26 | 0.51 |
| IL-1alpha | 6.00 | 53.38 | 0.17 | 0.02 |
| IL-1beta | 0.73 | 12.38 | 1.38 | 0.08 |
| IL-1ra | 2361.95 | 107.55 | 0.00 | 0.01 |
| IL-2 | 1.13 | 0.10 | 0.88 | 9.57 |
| IL-5 | 3.30 | 1.19 | 0.30 | 0.84 |
| IL-6 | 0.03 | 0.41 | 31.11 | 2.43 |
| IL-7 | 5.12 | 6.29 | 0.20 | 0.16 |
| IL-8 | 1.32 | 20.56 | 0.76 | 0.05 |
| MCP-1 | 1.20 | 0.00 | 0.84 | 395.51 |
| MIP-1alpha | 3.65 | 1.86 | 0.27 | 0.54 |
| MIP-1beta | 1.68 | 0.22 | 0.60 | 4.64 |
| MMP-2 | 0.52 | 0.20 | 1.93 | 4.92 |
| MMP-9 | 3.98 | 0.97 | 0.25 | 1.03 |
| PAI-1 | 0.53 | 0.60 | 1.88 | 1.66 |
| Prostatic Acid | 26.84 | 155.26 | 0.04 | 0.01 |
| Phosphatase | | | | |
| PAPP-A | 0.00 | 0.13 | 555.34 | 7.94 |
| Prostate Specific | 302.09 | 38.31 | 0.00 | 0.03 |
| Antigen, Free | | | | |
| RANTES | 37.28 | 0.21 | 0.03 | 4.85 |
| Stem Cell Factor | 3.64 | 10.61 | 0.27 | 0.09 |
| SGOT | 0.22 | 0.24 | 4.49 | 4.18 |
| Tissue Factor | 0.15 | 8.53 | 6.47 | 0.12 |
| TNF RII | 11.57 | 0.72 | 0.09 | 1.40 |
| TNF-alpha | 39.73 | 10.00 | 0.03 | 0.10 |
| TNF-beta | 0.42 | 0.24 | 2.41 | 4.11 |
| Thrombopoietin | 1.04 | 0.49 | 0.96 | 2.03 |
| VCAM-1 | 1.09 | 0.16 | 0.92 | 6.31 |
| VEGF | 18.76 | 142.28 | 0.05 | 0.01 |

### Example 21

### Generation of Modified Vaccinia Virus Strains

### A. Construction of Modified Vaccinia Viruses

[0350] Modified vaccinia viruses were generated by replacing nucleic acid or inserting nucleic acid at the thymidine kinase (TK) gene locus (also referred to as JR2 locus. The heterologous DNA inserted at this locus were expression cassettes containing protein-encoding DNA, operably linked in the correct or reverse orientation to a vaccinia virus promoter.

[0351] The starting strain used in generating the modified vaccinia viruses was vaccinia virus (VV) strain GLV-1h68 (also named RVGL21, SEQ ID NO: 2). This genetically engineered strain, which is described in U.S. Patent Publication No. 2005/0031643, contains DNA insertions in the F14.5L (also referred to as F3; see U.S. Patent Publication No. 2005/0031643), thymidine kinase (TK) and hemagglutinin (HA) genes. GLV-1h68 was prepared from the vaccinia virus strain designated LIVP (a vaccinia virus strain, originally derived by adapting the Lister strain (ATCC Catalog No. VR-1549) to calf skin (Research Institute of Viral Preparations, Moscow, Russia, Al'tshtein et al. (1983) Dokl. Akad. Nauk USSR 285:696-699). The LIVP strain (genome sequence set forth in SEQ ID NO: 1), from which GLV-1h68 was generated, contains a mutation in the coding sequence of the TK gene (see SEQ ID NO: 1 for the sequence of the LIVP strain) in which a substitution of a guanine nucleotide with a thymidine nucleotide (nucleotide position 80207 of SEQ ID NO: 1) introduces a premature STOP codon within the coding sequence.

[0352] As described in U.S. Patent Publication No. 2005/0031643 (see particularly Example 1, therein), GLV-1h68 was generated by inserting expression cassettes encoding detectable marker proteins into the F14.5L (also designated in LIVP as F3) gene, thymidine kinase (TK) gene, and hemagglutinin (HA) gene loci of the vaccinia virus LIVP strain. Specifically, an expression cassette containing a Ruc-GFP cDNA (a fusion of DNA encoding Renilla luciferase and DNA encoding GFP) under the control of a vaccinia synthetic early/late promoter P_{SEL} was inserted into the F14.5L gene; an expression cassette containing DNA encoding beta-galactosidase under the control of the vaccinia early/late promoter P_{7.5k} (denoted (P_{7.5k})LacZ) and DNA encoding a rat transferrin receptor positioned in the reverse orientation for transcription relative to the vaccinia synthetic early/late promoter P_{SEL} (denoted (P_{SEL})rTrfR) was inserted into the TK gene (the resulting virus does not express transferrin receptor protein since the DNA encoding the protein is positioned in the reverse orientation for transcription relative to the promoter in the cassette); and an expression cassette containing DNA encoding β-glucuronidase under the control of the vaccinia late promoter P₁₁ₖ (denoted (P₁₁ₖ)gusA) was inserted into the HA gene.

[0353] Insertion of the expression cassettes into the LIVP genome in the generation of GLV-1h68 resulted in disruption of the coding sequences for each of the F14.5L, TK and HA genes; accordingly, all three genes in the GLV-1h68 strain are nonfunctional in that they do not encode the corresponding full-length proteins. As described in U.S. Patent Publication No. 2005/0031643, disruption of these genes not only attenuates the virus but also enhances its tumor-specific accumulation. Previous data have shown that systemic delivery of the GLV-1h68 virus in a mouse model of breast cancer resulted in the complete eradication of large subcutaneous GI-101A human breast carcinoma xenograft tumors in nude mice (see U.S. Patent Publication No. 2005/0031643).

[0354] 1. Modified Viral Strains

[0355] Modified recombinant vaccinia viruses containing heterologous DNA inserted into the TK locus of the vaccinia virus genome were generated via homologous recombination between DNA sequences in the genome and a transfer vector using methods described herein and known to those of skill in the art (see, e.g., Falkner and Moss (1990) J. Virol. 64:3108-2111; Chakrabarti et al. (1985) Mol. Cell. Biol. 5:3403-3409; and U.S. Pat. No. 4,722,848). With these methods, the existing target gene in the starting vaccinia virus (GLV-1h68) genome was replaced by an interrupted copy of the gene contained in each transfer vector through two crossover events: a first crossover event of homologous recombination between the vaccinia virus genome and the transfer vector and a second crossover event of homologous recombination between direct repeats within the target locus. The interrupted version of the target gene that was in the transfer vector contained the insertion DNA flanked on each side by DNA corresponding to the left portion of the target gene and right portion of the target gene, respectively. Each of the transfer vectors also contained a dominant selection marker, the E. coli guanine phosphoribosyltransferase (gpt) gene, under the control of a vaccinia virus early promoter (P_{7.5kE}). Including such a marker in the vector enabled a transient dominant selection process to identify recombinant virus grown under selective pressure that has incorporated the transfer vector within its genome. Because the marker gene was not stably integrated into the genome, it was deleted from the genome in a second crossover event that occurred when selection was removed. Thus, the final recombinant virus contained the interrupted version of the target gene as a disruption of the target loci, but did not retain the selectable marker from the transfer vector.

[0356] Homologous recombination between a transfer vector and the starting vaccinia virus genome (GLV-1h68) occurred upon introduction of the transfer vector into cells that had been infected with the starting vaccinia virus. A series of transfer vectors was constructed as described below and used in construction of the following modified vaccinia strains: GLV-1h103, GLV-1h119, GLV-1h120 and GLV-1h121. The construction of these strains is summarized in the following Table, which lists the modified vaccinia virus strains, including the previously described GLV-1h68 (see section A, above), their respective genotypes, and the transfer vectors used to engineer the viruses:

TABLE 33
Generation of engineered vaccinia viruses

| | Parental | VV | |
|---|---|---|---|
| Name of Virus | Virus | Transfer Vector | Genotype |
| GLV-1h68 | — | — | F14.5L: (P_{SEL})Ruc-GFP |
| | | | TK: |
| | | | (P_{SEL})rTrfR-(P_{7.5k})LacZ |
| | | | HA: (P₁₁ₖ)gusA |
| GLV-1h103 | GLV-1h68 | TK-SL-hMCP1 | F14.5L: (P_{SEL})Ruc-GFP |
| | | (SEQ ID | TK: (P_{SL})hmcp-1 |
| | | NO: 395) | HA: (P₁₁ₖ)gusA |
| GLV-1h119 | GLV-1h68 | TK-SE-mIP10-1 | F14.5L: (P_{SEL})Ruc-GFP |
| | | (SEQ ID | TK: (P_{SE})mIP-10 |
| | | NO: 399) | HA: (P₁₁ₖ)gusA |
| GLV-1h120 | GLV-1h68 | TK-SEL-mIP10-1 | F14.5L: (P_{SEL})Ruc-GFP |
| | | (SEQ ID | TK: (P_{SEL})mIP-10 |
| | | NO: 401) | HA: (P₁₁ₖ)gusA |
| GLV-1h121 | GLV-1h68 | TK-SL-mIP10-1 | F14.5L: (P_{SEL})Ruc-GFP |
| | | (SEQ ID | TK: (P_{SL})mIP-10 |
| | | NO: 400) | HA: (P₁₁ₖ)gusA |

Briefly, these strains were generated as follows (further details are provided below):

[0357] GLV-1h103 was generated by insertion of an expression cassette containing DNA encoding human monocyte chemoattractant protein-1 (hMCP1; a chemoattractant that specifically attracts monocytes and memory T cells), under the control of the vaccinia synthetic late promoter (P_{SL}), into the TK locus of strain GLV-1h68 (parental virus), thereby deleting the LacZ/rTFr expression cassette at the TK locus of GLV-1h68. Strain GLV-1h103 retains the Ruc-GFP expression cassette at the F14.5L locus and the gusA expression cassette at the HA locus.

[0358] GLV-1h119 was generated by insertion of an expression cassette containing DNA encoding mouse interferon-γ inducible protein 10 (mIP-10; a potent chemoattractant for activated T cells and NK cells), under the control of the vaccinia synthetic early promoter (P_{SEL}), into the TK locus of strain GLV-1h68 (parental virus), thereby deleting the LacZ/rTFr expression cassette at the TK locus of GLV-1h68. Strain GLV-1h119 retains the Ruc-GFP expression cassette at the F14.5L locus and the gusA expression cassette at the HA locus.

[0359] GLV-1h120 was generated by insertion of an expression cassette containing DNA encoding mouse interferon-γ inducible protein 10 (mIP-10; a potent chemoattractant for activated T cells and NK cells), under the control of the vaccinia synthetic early/late promoter (P_{SEL}), into the TK locus of strain GLV-1h68 (parental virus), thereby deleting the LacZ/rTFr expression cassette at the TK locus of GLV-1h68. Strain GLV-1h120 retains the Ruc-GFP expression cassette at the F14.5L locus and the gusA expression cassette at the HA locus.

[0360] GLV-1h121 was generated by insertion of an expression cassette containing DNA encoding mouse interferon-γ inducible protein 10 (mIP-10; a potent chemoattractant for activated T cells and NK cells), under the control of the vaccinia synthetic late promoter (P_{SL}), into the TK locus of strain GLV-1h68 (parental virus), thereby deleting the LacZ/rTFr expression cassette at the TK locus of GLV-1h68. Strain GLV-1h121 retains the Ruc-GFP expression cassette at the F14.5L locus and the gusA expression cassette at the HA locus.

[0361] 2. VV Transfer Vectors Employed for the Production of the Modified Vaccinia Viruses

[0362] The following vectors were constructed and employed as described below to generate the recombinant vaccinia viral strains listed in Table 33, above.

[0363] a. Construction of the TK-SL-hMCP1 Transfer Vector for Insertion of Human MPC-1 Encoding DNA into the Vaccinia Virus TK Locus

[0364] The TK-SL-hMCP1 transfer vector (SEQ ID NO: 395) was used to produce the modified vaccinia virus strain GLV-1h103 (see Table 33, above), which had the genotype F14.5L: (P_{SEL})Ruc-GFP; TK: (P_{SL})hmcp-1; HA: (P₁₁ₖ)gusA. Strain GLV-1h103 was generated by inserting DNA (SEQ ID NO: 396) encoding a human monocyte chemoattractant protein-1 (hMCP-1) protein (SEQ ID NO: 135) into the TK locus of strain GLV-1h68, thereby deleting the rTrJR-LacZ expression cassette at the TK locus of strain GLV-1h68. The transfer vector TK-SL-hMCP1, which was used in this process, contained a DNA fragment encoding the hMCP-1 protein operably linked to the vaccinia synthetic late promoter (P_{SL}), sequences of the TK gene flanking the (P_{SL})/protein-encoding DNA fragment. The vector was generated as follows:

[0365] hMCP-1 cDNA was amplified by PCR (Accu Prime Pfx Supermix) from a cDNA template (clone encoding Homo sapiens chemokine (C—C motif) ligand 2 (cDNA clone TC118317; Origene; SEQ ID NO: 391), using the following primers:

hMCP1-5 (Sal I)

(SEQ ID NO: 392)

5′-GTCGACGCCACCATGAAAGTCTCTGCCGCCCT-3′;
and
hMCP1-3 (Pac I)

(SEQ ID NO: 393)

5′-TTAATTAATCAAGTCTTCGGAGTTTGGGTTTGC-3′.

[0366] These primers contained recognition sites for Sal I and Pac I restriction enzymes, respectively. The product from this PCR amplification was run on an agarose gel and purified and cloned into the pCR®-Blunt II-TOPO® vector (SEQ ID NO: 394) using a Zero Blunt® TOPO® PCR Cloning Kit (Invitrogen™, Carlsbad, Calif.). The nucleic acid sequence of the resulting construct, pCRII-hMCP1-2 was confirmed by sequencing. This pCRII-hMCP1-2 construct was digested with Sal I and Pac I to release the hMCP-1 cDNA, which then was subcloned into a TK-SL-CSF4 vector (which contains the cDNA for GM-CSF under the control of the vaccinia synthetic late promoter flanked by the TK gene regions) that also had been digested with Sal I and Pac I. Subcloning replaced the GM-CSF cDNA in the TK-SL-CSF4 vector with hMCP-1, thereby placing hMCP-1 under the control of vaccinia synthetic late promoter (P_{SL}). The nucleotide sequence of the resulting construct, TK-SL-hMCP1 (SEQ ID NO: 395), was confirmed by sequencing.

[0367] b. Construction of the TK-SE-mIP10-1, TK-SL-mIP10-1 and TK-SEL-mIP10-1 Transfer Vectors for Insertion of Mouse IP-10 Encoding DNA into the Vaccinia Virus TK Locus

[0368] The TK-SE-mIP10-1 (SEQ ID NO: 399), TK-SL-mIP10-1 (SEQ ID NO: 400) and TK-SEL-mIP10-1 (SEQ ID NO: 401) transfer vectors were used to produce the modified vaccinia virus strains GLV-1h103GLV-1h119, GLV-1h121 and GLV-1h120, respectively (See Table 33, above). As listed in Table 33, these viruses had the following genotypes: F14.5L: (P_{SEL})RUC-GFP, TK: (P_{SEL})mIP-10, HA: (P₁₁ₖ)gusA (GLV-1h119); F14.5L: (P_{SEL})RUC-GFP, TK. (P_{SEL})mIP-10 HA: (P₁₁ₖ)gusA (GLV-1h121); and F14.5L: (P_{SEL})RUC-GFP, TK: (P_{SEL})mIP-10, HA: (P₁₁ₖ)guSA (GLV-1h120). Each of the virus strains was generated by inserting DNA (SEQ ID NO: 398) encoding a mouse interferon-γ inducible protein 10 (mIP-10) (SEQ ID NO: 24) into the TK locus of strain GLV-1h68, thereby deleting the rTrfR-LacZ expression cassette at the TK locus of strain GLV-1h68.

[0369] The three transfer vectors used in this process, TK-SE-mIP10-1, TK-SL-mIP10-1 and TK-SEL-mIP10-1, contained DNA fragments encoding the mIP-10 protein, operably linked to the vaccinia synthetic early promoter (P_{SEL}), synthetic late promoter (P_{SL}), and synthetic early/late promoter (P_{SEL}), respectively. These transfer vectors further contained sequences of the TK gene flanking the promoter/protein-encoding DNA fragment. These transfer vectors were generated as follows:

[0370] Mouse IP-10 cDNA was amplified by PCR using a cDNA template (mouse GenePools cDNA from Biomedomics, Inc. (Research Triangle Park, N.C.; Catalog number BM2080-1)), and the following primers:

mIP10-5 (Sal I)

(SEQ ID NO: 402)

5′-GTCGACGCCACCATGAACCCAAGTGCTGCCGT-3′
mIP10-3 (Pac I)

(SEQ ID NO: 403)

5′-TTAATTAATTAAGGAGCCCTTTTAGACCTTTTTTGG-3′.

[0371] As indicated, these primers contained the Sal I and Pac I restriction enzyme recognition sites, respectively. The product from this PCR amplification was run on an agarose gel, purified and cloned into the pCR®-Blunt II-TOPO® vector (SEQ ID NO: 394) using a Zero Blunt® TOPO® PCR Cloning Kit (Invitrogen™, Carlsbad, Calif.). The nucleotide sequence of the resulting construct, pCRII-mIP10, was confirmed by sequencing.

[0372] This pCRII-mIP10 construct was digested with Sal I and Pac I to release the mIP-10 cDNA, which then was subcloned into the TK-SE-CSF-2 (which contains the cDNA for GM-CSF under the control of the vaccinia synthetic early promoter flanked by the TK gene regions. SEQ ID NO: 404), TK-SL-CSF4 (which contains the cDNA for GM-CSF under the control of the vaccinia synthetic late promoter flanked by the TK gene regions) and TK-SEL-CSF-2 (which contains the cDNA for GM-CSF under the control of the vaccinia synthetic early/late promoter flanked by the TK gene regions; SEQ ID NO: 405) vectors (which had been digested with Sal I and Pac I), to generate the TK-SE-mIP10-1, TK-SL-mIP10-1, and TK-SEL-mIP10-1 transfer vectors, respectively. Subcloning into TK-SE-CSF-2, TK-SL-CSF4 and TK-SEL-CSF-2 replaced GM-CSF-encoding cDNA in these vectors with cDNA encoding mIP-10, thereby placing mIP-10 expression under the control of vaccinia synthetic early SE, late SL, and early/late promoter SEL, respectively. The nucleotide sequences of the resulting transfer vectors, TK-SE-mIP10-1, TK-SL-mIP10-1, and TK-SEL-mIP10-1, were confirmed by sequencing.

[0373] 3. Preparation of Recombinant Vaccinia Viruses

[0374] For preparation of the GVL-1h103, GVL-1h119, GVL-1h120 and GVL-1h121 modified viruses, CV-1 cells, grown in DMEM (Mediatech, Inc., Herndon, Va.) with 10% FBS, were infected with the indicated parental viruses (Table 33) at an m.o.i. of 0.1 for 1 hr, then transfected using Lipofectamine 2000 or Fugene (Roche, Indianapolis, Ind.) with 2 μg of the corresponding transfer vector (Table 33). Infected/transfected cells were harvested and the recombinant viruses were selected using a transient dominant selection system and plaque purified using methods known in the art (see, e.g., Falkner and Moss, J. Virol., 64, 3108-3111 (1990)). Isolates were plaque purified five times with the first two rounds of plaque isolation conducted in the presence of mycophenolic acid, xanthine and hypoxanthine which permits growth only of recombinant virus that expressing the selectable marker protein, i.e., E. coli guanine phosphoribosyltransferase (gpt), under the control of the vaccinia P_{7.5kE} promoter. Each of the transfer vectors used in the generation of the GVL-1h103, GVL-1h119, GVL-1h120 and GVL-1h121 recombinant vaccinia viruses contained a (P_{7.5kE})gpt expression cassette. Thus, growth of the virus in the presence of the selection agents enabled identification of virus in which the first crossover event of homologous recombination between the transfer vector and the parental strain genome had occurred. Subsequent growth of the isolates in the absence of selection agents and further plaque purification yielded isolates that had undergone a second crossover event resulting in deletion of the DNA encoding guanine phosphoribosyltransferase from the genome. This was confirmed by the inability of these isolates to grow in the presence of selection agents.

[0375] 4. Verification of Vaccinia Virus Strain Genotypes

[0376] The genotypes of the GVL-1h103, GVL-1h119, GVL-1h120 and GVL-1h121 modified vaccinia virus strains were verified by PCR and restriction enzyme digestion and lack of expression of β-galactosidase in these viruses was confirmed by X-gal (5-bromo-4-chloro-3-indolyl-β-D-galactopyranoside) staining of the infected cells to confirm lack of ability to convert the X-gal substrate, as indicated by lack of development of blue color in the assays compared to a control strain (e.g. GLV-1h68). Viruses lacking lacZ expression are unable to convert the X-gal substrate. Standard techniques for X-GlcA and X-gal viral staining and fluorescence microscopy were employed and are well-known in the art.

### B. Vaccinia Virus Purification

[0377] Ten T225 flasks of confluent CV-1 cells (seeded at 2×10⁷ cells per flask the day before infection) were infected with each virus at m.o.i. of 0.1. The infected cells were harvested two days post infection and lysed using a glass Dounce homogenizer. The cell lysate was clarified by centrifugation at 1,800 g for 5 min, and then layered on a cushion of 36% sucrose, and centrifuged at 13,000 rpm in a HB-6 rotor, Sorvall RC-5B Refrigerated Superspeed Centrifuge for 2 hours. The virus pellet was resuspended in 1 ml of 1 mM Tris, pH 9.0, loaded on a sterile 24% to 40% continuous sucrose gradient, and centrifuged at 26,000 g for 50 min. The virus band was collected and diluted using 2 volumes of 1 mM Tris, pH 9.0, and then centrifuged at 13,000 rpm in a HB-6 rotor for 60 min. The final virus pellet was resuspended in 1 ml of 1 mM Tris, pH 9.0 and the titer was determined in CV-1 cells (ATCC No. CCL-70).

[0378] Since modifications will be apparent to those of skill in this art, it is intended that this invention be limited only by the scope of the appended claims.

The application's sequence listing, which the Patent Office published only in electronic form, follows.

SEQUENCE LISTING (486 sequences)

SEQ ID NO: 1 - DNA, 190167 bp, Vaccinia virus
  LIVP genome (reconstituted from GLV-ih68 sequence)
ttatgagaccatcaaagagagaaagagaataaaaatatttttgtaaaactttttttatgagaccatcaaagagagaaagagaataaaaatatttttgtaaaacttttttatgagaccatcaaagagagaaagagaataaaaatatttttgtaaaacttttttatgagaccatcaaagagagaaagagaataaaaatatttttgtaaaactttttttatgagaccatcaaagagagaaagagaataaaaatatttttgtaaaactttttttatgagaccatcaaagagagaaagagaataaaaatatttttgtaaaactttttttatgagaccatcaaagagagaaagagaataaaaatatttttgtaaaactttttttatgagaccatcaaagagagaaagagaataaaaatatttttgtaaaactttttttatgagaccatcaaagagagaaagagaataaaaatatttttgtaaaactttttttatgagaccatcaaagagagaaagagaataaaaatatttttgtaaaactttttttatgagaccatcaaagagagaaagagaataaaaatatttttgtaaaactttttttatgagaccatcaaagagagaaagagaataaaaatatttttgtaaaactttttttatgagaccatcaaagagagaaagagaataaaaatatttttgtaaaactttttttatgagaccatcaaagagagaaagagaataaaaatatttttgtaaaactttttttatgagaccatcaaagagagaaagagaataaaaatatttttgtaaaactttttttatgagaccatcagaaagaggtttaatatttttgtgatactctgaaaggaaataggaataggaataggaatagtgtcataatcgtatcacactattgagacagaaaaagaagaagtcgcgagaggtaactttttgtgaatgtagttaagaacatttttgttttgcaaaccggaatatagtgtccggtacacttttttaattcgtggtgtgcctgaatcgttcgattaaccctactcatccaatttcagatgaatagagttatcgattcagacacacgctttgagttttgttgaatcgatgagtgaagtatcatcggttgcaccttcagatgccgatccgtcgacatacttgaatccatccttgacctcaagttcagatgattccttgcacatgtctccgatacgaacgctaaactctagattcttgacgcattttgtatcgacgatcgttgaaccgatgatatcttcgtaactcactttcttatgagagatgttagacccgagtactggatgggtcttgatgtcgctgtctttctcttcttcgctacatctgatgtcgatagacacttcacagtctttgatcatagcaagagcttcttcatgagtgatcgcgggagagtccttaccttgtcctggggacacgctggacaatctagcattcactgtgtttccatcagcggattctgagatggatttaatctgaggacatttggtgaatccaaagttcattctcagacctccaccgatgatggagtaataagtggtaggaggatctacatcctcgactgatgtggaatcatcttctgattccacctcgggatctggatctgactcggactctgtaatttccgttacggattggcaaatcttatcattggtcggtgtttggtcttgctttgtgactttgataataacatcgattcccatatgatgtttgttttcttcttccgtacacgaggaggaggatgaggatgattgctgaagactggcaggcatagcagctgccgccaggcacatgcatgccaggacgatatattgtttcataattgctattgattgagtactgttctttatgattctacttccttaccgtgcaataaattagaatatattttctacttttacgagaaattaattattgtatttattatttatgggtgaaaaacttactataaaaagtgggtgggtttggaattagtgatcagtttatgtatatcgcaactaccgggcatatggctatcgacatcgagaacattacccacatgataagagattgtatcagtttcgtagtcttgagtattggtattactatatagtatatagatgtcgcccactagagttactgtctccgaatgcggcatgatagtatcattctttgctttcgttaactgtttggaggaagaatctttgttattgcatttaatctcgaaattcagagtgcacacctttctcctgtaaagaaacctgaagtcgctaccttattaagaacggagaagtatccatcacgaaatacgggattacagtctttatgattcatagtaatagttagttccgacgttgagatggattcgctgagaccggtagtggtcgtccgagtacacgacgtgtcgttaactggatacaggttaatttccacatcgatatagttaaacgtatttctgggtacgggttcgcatttatctgcggaagagacggtgtgagaatatgttccgagaccacacggagaacagatgacgtctccggatactccgtatcctattccacattttgtttgggaaacacatgccttgcatccggatgatcctttgagaagacaataatatccgggagagcattcacagattctattgtgagtcgtgttacacgatcgcgtcttccgttacaacttagacaagcgggtaaatgattattgcgagatgtgaaggtacccgaaccacacggcgtacatcgtgtgttagtcttgctatcgcataatctggaagcgtatgttcccggacacaaattatggcgtttgtattcgttgtctttacactttccatcggatggtgcatgcggtgctatatctcttccgtttattattatacatgagagaaacaatatatacgagtataatacggacttcatgatttaataatgtagtaatcgttgtcttgttcctgtttcctacttctccaatcatatagatattttctttctatcatggataatatttgtaatggttctttccgtacaacatactgtttagatgatattgcgcataatttccggaggcaaatacgatagtctagattgaccgatggtagactctaatttattgagtgctttgtcgacgagtttacttttacgctccatcgatagatggcactgttctatgagatcgtcgtacatgggaaatgaaatgtgactgtctgaatgtatggctttaagatagctgtgataccgtatacaggtcggtgtcggagattcgaatctctttgaggcgacttatgtcacgatgatggaatctatcttatcgaatgatatatttttcataaatacacttttatagtcctcgtttaaacagaatttactatgtagttccgcgaatgactcgtcccttaataggcagtaggctagtatcttttttacgtagtaatcgtcgtagggagagacatcttgtagaacaacgatttcgttttgttttctcttctgtaactgcttttctggatggccgtattgattatcgagcgtgatactcgctccatattccaataaccgctttgcaaattgtatattattgacatcgaccgcgtaatatagtagagttatcgatcatatctatatcatccatgtacttgcttagtatatcaaatacatctatcagtatggtttcataacagtgatacccgcaattattaaatctcgataatatcagaccgtacatacatagacggccattgttcgatacgtgatttacagccgcgtgtccatattttccacgataaaccttacgacgtttacatcgacgagattattattaacaaagtagtcgtgtagaggatagttgttgtccgttatctaacatgcatcgaacgaccatatcgccgtaatgtaagtagtttatcagtatggcttgtacgatggattcatcctgttgtctaaatctctttagaatgttatcgatgatgtagtggttatattctctggaatcgtacgaagtaatactacgcattacgtcgacaagagtatgacgtctctcaataagaagattaacgatttccatgtctacattatatggggttactctaaatcgcttgtttagataatacgcctctaatatagggctgacgtcgtatactctacacgtgtccacatcctttattaataataatttaacaatctctatatctatggttgagaaagaccagtagtattggatgggtaaagatcctccttcgtctctgccatggatggaaacattgttatcgatcaaacatttaattacatccttggatagagattgagattctctatgagacgatatatagtaatgaagagagttcttacacatatcactgtcgtacatacaggtacgaaatacgtaaccggtgctgtaacattctgatttaagaagccatagcaatacttctggtctcggattaggcgtcgttacgtatatatccaccaatccgagaccattgattgcataattcgtattcttggacggacgtatccgtttatccacaattaggtattttagcagacgtaagtcgatattatccgaatacagatcgaaatcatttatattcgacttgagttcgttagaggaatttgaatagctggatatcagtagatgcacaatctgagattttacgtatctatgcttactgtatactcctagcggagttaatccttcgttgtttctacaaagtctctcgactccgcgagagaacaatcttaatgtctgtatcgcatttattggagacgtaacaatgtagcgcattgtttcctcgtctatctatatgttttgataagttgtgacacgtttcaatttctagttttatttttttgtacgtcacatcttcatccagtagacgacatagaatagtgcactctctaccacaataatccatagctattctggtgctaattattcctatttcacgaaggcaatcattcctcataagatgataaaaagtgtagtggagatttagtatttagcagtgcggatatgatccaagagggtgagatagtcgttctcgttcagaatctttcgcagcataagtagtatgtcgatatacttatcgttgaagactctttataaaagtctatttgtttatatttattgcggatagcagtatttccctataaaaagtatacgtcctgtggtgtctttaatcatgtacatgaatggatggtttatgtagaccttcgtacgatataccatcgaaaagttaatcgtaaatactcctgtaacggccgatgcttctgtatactcctcattaacatctataaacgtcgtatgtagaaatttttctacagtgatagtttcattacacatcttgctaaaatctgcataatatccgaatatattagtaagtcctaaattttctaaaatcggtaccagattatacggttctgtcatttccactttaaactttggcatatacaagtctatacttttagtagataacataccacaccattttttaaatttttcatctgttatatttttttctatgttatatataccttctatgtcgtccggtagtataattaccatactagagtttccctcgtatggaatatcgataatagagaatcctccgaataattcattaatatgtacatattgcaagttattctcggtacccaccatcatatcaacgctggtaactatattcttagaaatataaaacttgtctgtatatgtaagatgtttagaaaatggatatttccacattgctttaaaatggacggcgctaacaactgtcatacgagtattaatggatagcggactagtcaataaggaattaattttaccatttgtcattgtcttaacccattcgttgattagttcctttgtttggttagcattattaaagtttacagtttgaaaatcgtcttttattttttgtaggaaggaggcgtggaactcgatactatcgctaccgtatattttatttgcggtagctagtgtcgcacaatacggaatatctacctccatgtcatcattattgtcatcgggtgtattctcattcatattctctatatattttgatagttgttcagctgtagaaccagctgctccatgatttagaatagataaagtagataaaatggaaactggagaaatcaaaacattttcatcagggtgttttaagattagttctttaaagatatccatggtatagacctaacgataacgatatatatcataaataaataatgttaaatttcaatttatgtttgtaccccgtattcatacttaacaaattggtattgcgtacacaatcaatcatattacataccattaataatgcaagcataaaaaattgttagtagatgtttctaaatataggttccgtaagcaaagaatataagaatgaagcggtaatgataaaatcaatcgttatctaaaatgatcatactcatttattttattctattatattaacacatacatttttaacagcaacacattcaatattgtattgttatttttatattatttacacaattaacaatatattattagtttatattactgaattaataatataaaattcccaatcttgtcataaacacacactgagaaacagcataaacacagaatccatcaaaaatgttgataaattatctgatgttgttgttcgctgctatgataatcagatcattcgccgatagtggtaacgctatcgaaacgacattgccagaaattacaaacgctacaacagatattccagctatcagattatgcggtccagagggagatggatattgtttacacggtgactgtatccacgctagagatattgacggtatgtattgtagatgctctcatggttatacaggcattagatgtcagcatgtagtattagtagactatcaacgttcagaaaacccaaacactacaacgtcatatatcccatctcccggtattatgcttgtattagtaggcattattatgtgttgtctattatctgtttataggttcactcgacgaactaaactacctatacaagatatggttgtgccataatttttataaatttttttatgagtatttttacaaaaatgtataaagtgtatgtcttatgtatatttataaaaatgctaagtatgcgatgtatctatgttatttgtatttatctaaacaatacctctacctctagatattatacaaaaattttttatttcggcatattaaagtaaaatctagttaccttgaaaatgaatacagtgggtggttccgtatcaccagtaagaacataatagtcaaatacagtatccgattgagattttgcatacaatactagtctagaaagaaatttgtaatcatcttctgtgacgggagtccatatatctgtatcatcgtctagtttatcagtgtcccatgctatattcctgttatcatcattagttaatgaaaataactctcgtgcttcagaaaagtcaaatattgtatccatacatacatctccaaaactatcgcttatacgtttatctttaacgatacctatacctagatggttatttactaacagacattttccagatctattgactataactcctatagtttccacatcaaccaagtaatgatcatctattgttatataacaataacataactcttttccatttttatcagtatgtatatctatatcaacgtcgtcgttgtagtgaatagtagtcattgatctattatatgaaacggatatgtctagaacggcaattgttttacgtccagttaacactttcgttgatttaaagtctagagtctttgcaaacataatatccttatccgactttatatttcctgtagggtggtataattttattttgcctccacatatcggtgtttccaaatatattactagacaatattccatatagttattagttaagggtacccaattagaacacgtacgcttattatcatcatttggatcgtatttcataaaagttattgtgttatcgatgtcaacacattctacattttttaatcgtctatatagtatttttctgatattttctataatatcagaattgtcttccatcggaagttgtatactatcggaatcagttacatgtttaaataattctctgatgtcattccttatacaatcaaattcattattaaacagtttaatagtctgtagacctttatcgtcgtaaatatccattgtcttattagttacgcttatttttatgtgtttttacgttgctttattatattttataagaatgattgtttgacgaatcacgagaactattaagacacattattaggtatatattataaaaaagtttttgattacgatgttataagaggaaagaggacacattaacatcatacatcaattaactacattcttataacatcgtaatcaaaagaattgcaattttgatgtataacaactgtcaatgggttatggaattgtatattacatattatacggtatgttggtaacgacaaataccggtcggtaattgtctgccggtgtaatagaattatatatatctatctattacaccggccttgtatacataataataagttgtggtagtatgatctccatatttataatttaggactttgtattcagtatttttggaatcataaaaaataaaaaaaagttttactaatttaaaatttaaaaagtatttacatttttttcactgtttagtcgcggatatggaattcgatcctgccaaaatcaatacatcatctatagatcatgtaacaatattacaatacatagatgaaccaaatgatataagactaacagtatgcattatccgaaatattatatcaatatcacaaaaataaatacacatttggctaatcaatttcgggcttggaaaaaacgtatcgccggaagggactatatgactaacttatctagagatacaggaatacaacaatcaaaacttactgaaactatacgtaactgtcaaaaaaatagaaacatatatggtctatatatacactacaatttagttattaattggataaccgatgtgattatcaatcaatattaagagggttggtaaattggtacatagctaataatacctatactccaaatacacccaataatacaacaaccatttctgagttggatatcatcaaaatactaaataaatacgaggacgtgtatagagtaagtaaagaaaaagaatgtggaatttgctatgaagttgtttactcaaaacgatagatactttggtttattggattcgtgtactcatatattttgcataacatgcatcaatatatggcatagaacacgaagagaaaccggtgcgtcggataattgtcctatatgccgtacccgttttagaaacataacaatgagcaagttctataagctagttaactaataaataaaaagtttaatttgttgacgacgtatgtcgttattttttctcgtataaaagattaatttgattctaatataatctttagtattggataaatatcaattcaaattaattccattagattatatcataaataaaaatagtagcacacaactacttcagcaaacattctttttataaatgccatctagcgtagcgaggacacaagtgaacctataattatcaaatttattagtatcagtcacatgaaggactttacgtagagtgacgattccactatctgtggtacgaacggtttcatcttctttgatgccatcacccagatgttctataaacttggtatcctcgtccgatttcatatcctttgccaaccaatacatatagctaaactcaggcatatgttccacacatcctgaacaatgaaattctccagaagatgttacaatgtctagatttggacatttggtttcaaccgcgttaacatatgagtgaacacacccatacatgaaagcgatgagaaataggattctcatcttgccaaaatatcactagaaaaaatttatttatcagttttaaaggtataaaaaatacttattgttgctcgaatattttgtatttgatggtatacggaagattagaaatgtaggtattatcatcaactgattctatggttttatgtattctatcatgtttcactattgcgttggaaataatatcatatgcttccacatatattttattttgttttaactcataatactcacgtaattctggattattggcatatctatgaataattttagctccatgatcagtaaatattaatgagaacatagtattaccacctaccattatttttttcatctcattcaattcttaattgcaaagatctatataatcattatagcgttgacttatggactctggaatcttagacgatgtacagtcatctataatcatggcatatttaatacattgttttatagcatagtcgttatctacgatgttagatatttctctcaatgaatcaatcacacaatctaatgtaggtttatgacataatagcattttcagcagttcaatgtttttagattcgttgatggcaatggctatacatgtatatccgttatttgatctaatgttgacatctgaaccggattctagcagtaaagatactagagattgtttattatatctaacagccttgtgaagaagtgtttctcctcgtttgtcaatcatgttaatgtctttaagataaggtaggcaaatgtttatagtactaagaattgggcaagcataagacatgtcacaaagacccttttttgtatgtataagtgtaaaaattataacatccatagttggatttacataggtgtccaatcgggatctctccatcatcgagataattgatggcatctcccttccttttttagtagatatttcatcgtgtaagaatcaatattaatatttctaaagtatccgtgtatagcctctttatttaccacagctccatattccactagagggatatcgccgaatgtcatatactcaattagtatatgttggaggacatccgagttcattgttttcaatatcaaagagatggtttccttatcatttctccatagtggtacaatactacacattattccgtgcggctttccattttccaaaaacaatttgaccaaatctaaatctacatctttattgtatctataatcactatttagataatcagccataattcctcgagtgcaacatgttagatcgtctatatatgaataagcagtgttatctattcctttcattaacaatttaacgatgtctatatctatatgagatgacttaatataatattgaagagctgtacaatagtttttatctataaaagacggcttgattccgtgattaattagacatttaacaacttccggacgcacatatgctctcgtatccgactctgaatacagatgagagatgatatacagatgcaatacggtaccgcaatttcgtagttgataatcatcatacgcgtatcagtactcgtcctcataaagaacactgcagccattttctatgaacaaatcaataattttagaaacaggatcattgtcattacataattttctataactgaacgatggttttcacatttaacactcaagtcaaatccatgttctaccaacacctttatcaagtcaacgtctacatttttggatttcatatagctgaatatattaaagttatttatgttgctaaatccagtggcttctagtagagccatcgctatatccttattaactttaacatgtctactatttgtgtattcttctaatggggtaagctgtctccaatttttgcgtaatggattagtgccactgtctagtagtagtttgacgacctcgacattattacaatgctcattaaaaaggtatgcgtgtaaagcattattcttgaattggttcctggtatcattaggatctctgtctttcaacatctgtttaagttcatcaagagccacctcctcattttccaaatagtcaaacattttgactgaatgagctactgtgaactctatacacccacacaactaatgtcattaaatatcatgtcaaaaacttgtacaattattaataaaaataatttagtgtttaaattttaccagttccagattttacacctccgttaatacctccattaaccccactggacgatcctcctccccacattccaccgccaccagatgtataagttttagatcctttattactaccatcatgtccatggataaagacactccacatgccgccactaccccctttagaagacatattaataagacttaaggacaagtttaacaataaaattaatcacgagtaccctactaccaacctacactattatatgattatagtttctatttttacagtaccttgactaaagtttctagtcacaagagcaatactaccaacctacactattatatgattatagtttctatttttataggaacgcgtacgagaaaatcaaatgtctaatttctaacggtagtgttgataaacgattgttatccgcggatacctcctctatcatgtcgtctattttcttactttgttctattaacttattagcattatatattatttgattataaaacttatattgcttattagcccaatctgtaaatatcggattattaacatatcgtttctttgtaggtttatttaacatgtacatcactgtaagcatgtccttaccatttattttaatttgacgcatatccgcaatttctttttcgcagtcggttataaattctatatatgatggatacatgctacatgtgtacttataatcgactaatatgaagtacttgatacatattttcagtaacgatttattattaccacctatgaataagtacctgtgatcgtctaggtaatcaactgttttcttaatacattcgatggttggtaatttactcagaataatttccaatatcttaatatataattctgctatttctgggatatatttatctgccagtataacacaaatagtaatacatgtaaacccatattttgttattatattaatgtctgcgccattatctattaaccattctactaggctgacactatgcgactcaatacaatgataaagtatactacatccatgtttatctattttgtttatatcatcaatatacggcttacaaagttttagtatcgataacacatccaactcacgcatagagaaggtagggaataatggcataatatttattaggttatcatcattgtcattatctacaactaagtttccattttttaaaatatactcgacaactttaggatctctattgccaaatttttgaaaatatttatttatatgcttaaatctatataatgtagctccttcatcaatcatacatttaataacattgatgtatactgtatgataagatacatattctaacaatagatcttgtatagaatctgtatatcttttaagaattgtggatattaggatattattacataaactattacacaattctaaaatataaaacgtatcacggtcgaataatagttgatcaactatataattatcgattttgtgatttttcttcctaaactgtttacgtaaatagttagatagaatattcattagttcatgaccactatagttactatcgaataacgcgtcaaatatttcccgtttaatatcgcatttgtcaagataataatagagtgtggtatgttcacgataagtataataacgcatctctttttcgtgtgaaattaaatagtttattacgtccaaagatgtagcataaccatcttgtgacctagtaataatataataatagagaactgttttacccattctatcatcataatcagtggtgtagtcgtaatcgtaatcgtctaattcatcatcccaattataatattcaccagcacgtctaatctgttctattttgatcttgtatccatactgtatgttgctacatgtaggtattcctttatccaataatagtttaaacacatctacattgggatttgatgttgtagcgtatttttctacaatattaataccatttttgatactatttatttctatacctttcgaaattagtaatttcaataagtctatattgatgttatcagaacatagatattcgaatatatcaaaatcattgatatttttatagtcgactgacgacaataacaaaatcacaacatcgtttttgatattattatttttcttggtaacgtatgcctttaatggagtttcaccatcatactcatataatggatttgcaccactttctatcaatgattgtgcactgctggcatcgatgttaaatgttttacaactatcatagagtatcttatcgttaaccatgattggttgttgatgctatcgcattttttggtttctttcatttcagttatgtatggatttagcacgtttgggaagcatgagctcatatgatttcagtactgtagtgtcagtactattagtttcaataagatcaatctctagatctatagaatcaaaacacgataggtcagaagataatgaatatctgtaggcttcttgttgtactgtaacttctggttttgttagatggttgcatcgtgctttaacgtcaatggtacaaattttatcctcgctttgtgtatcatattcgtccctactataaaattgtatattcagattatcatgcgatgtgtatacgctaacggtatcaataaacggagcacaccatttagtcataaccgtaatccaaaaatttttaaagtatatcttaacgaaagaagttgtgtcattgtctacggtgtatggtactagatcctcataagtgtatatatctagagtaatgtttaatttattaaatggttgataatatggatcctcgtgacaatttccgaagatggaaataagacataaacacgcaataaatctaattgcggacatggttactccttaaaaaaatacgaataatcaccttggctatttagtaagtgtcatttaacactatactcatattaatccatggactcataatctctatacgggattaacggatgttctatatacggggatgagtagttctcttctttaactttatactttttactaatcatatttagactgatgtatgggtaatagtgtttgaagagctcgttctcatcatcagaataaatcaatatctctgtttttttgttatacagatgtattacagcctcatatattacgtaatagaacgtgtcatctaccttattaactttcaccgcatagttgtttgcaaatacggttaatcctttgacctcgtcgatttccgaccaatctgggcgtataatgaatctaaactttaattgcttgtaatcattcgaaataatttttagtttgcatccgtagttatcccctttatgtaactgtaaatttctcaacgcgatatctccattaataatgatgtcgaattcgtgctgtatacccatactgaatggatgaacgaataccgacggcgttaatagtaatttactttttcatctttacatattgggtactagttttactatcataagtttataaattccacaagctactatggaataagccaaccatcttagtataccacacatgtcttaaagtttattaattaattacatgttgttttatatatatcgctacgaatttaaagagaaattagtttaggaagaaaaattatctatctacatcatcacgtctctgtattctacgatagagtgctactttaagatgcgacagatccgtgtcatcaaatatatactccattaaaatgattattccggcagcgaacttgatattggatatatcacaacctttgttaatatctacgacaatagacagcagtcccatggttccataaacagtgagtttatctttctttgaagagatattttgtagagatcttataaaactgtcgaatgacatcgcatttatatctttagctaaatcgtatatgttaccatcgtaatatctaaccgcgtctatcttaaacgtttccatcgctttaaagacgtttccgatagatggtctcatttcatcagtcatactgagccaacaaatataatcgtgtataacatctttgatagaatcagactctaaagaaaacgaatcggctttattatacgcattcatgataaacttaatgaaaaatgtttttcgttgtttaagttggatgaatagtatgtcttaataattgttattatttcattaattaatatttagtaacgagtacactctataaaaacgagaatgacataactaatcataactagttatcaaagtgtctaggacgcgtaattttcatatggtatagatcctgtaagcattgtctgtattctggagctattttctctatcgcattagtgagttcagaatatgttataaatttaaatcgaataacgaacataactttagtaaagtcgtctatattaactcttttattttctagccatcgtaataccatgtttaagatagtatattctctagttactacgatctcatcgttgtctagaatatcacatactgaatctacatccaattttagaaattggtctgtgttacatatctcttctatattattgttgatgtattgtcgtagaaaactattacgtagaccattttctttataaaacgaatatatagtactccaattatctttaccgatatatttgcacacataatccattctctcaatcactacatctttaagattttcgttgttaagatatttggctaaactatataattctattagatcatcaacagaatcagtatatatttttctagatccaaagacgaactctttggcgtcctctataatattcccagaaaagatattttcgtgttttagtttatcgagatctgatctgttcatatacgccatgattgtacggtacgttatgataaccgcataaaataaaaatccattttcatttttaaccaatactattcataattgagattgatgtaatactttgttactttgaacgtaaagacagtacacggatccgtatctccaacaagcacgtagtaatcaaatttggtgttgttaaacttcgcaatattcatcaatttagatagaaacttatactcatcatctgttttaggaatccatgtattattaccactttccaacttatcattatcccaggctatgtttcgtccatcatcgttgcgcagagtgaataattcttttgtattcggtagttcaaatatatgatccatgcatagatcggcaaagctattgtagatgtgatttttcctaaatctaatataaaactcgtttactagcaaacactttcctgatttatcgaccaagacacatatggtttctaaatctatcaagtggtggggatccatagttatgacgcagtaacatatattattacattcttgactgtcgctaatatctaaatatttattgttatcgtattggattctgcatatagatggcttgtatgtcaaagatatagaacacataaccaatttatagtcgcgctttacattctcgaatctaaagttaagagatttagaaaacattatatcctcggatgatgttatcactgtttctggagtaggatatattaaagtctttacagatttcgtccgattcaaataaatcactaaataatatcccacattatcatctgttagagtagtatcattaaatctattatattttatgaaagatatatcactgctcacctctatatttcgtacatttttaaactgtttgtataatatctctctgatacaatcagatatatctattgtgtcggtagacgataccgttacatttgaattaatggtgttccattttacaacttttaacaagttgaccaattcatttctaatagtatcaaactctccatgattaaatattttaatagtatccattttatatcactacggacacaaagtagctgacataaaccattgtataatttttatgttttatgtttattagcgtacacattttggaagttccggcttccatgtatttcctggagagcaagtagatgatgaggaaccagatagtttatatccgtacttgcacttaaagtctacattgtcgttgtatgagtatgatcttttaaacccgctagacaagtatccgtttgatattgtaggatgtggacatttaacaatctgacacgtgggtggatcggaccattctcctcctgaacacaggacactagagttaccaatcaacgaatatccactattgcaactataagttacaacgctcccatcggtataaaaatcctcgtatccgttatgtcttccgttggatatagatggaggggattggcatttaacagattcacaaataggtgcctcgggattccataccatagatccagtagatcctaattcacaatacgatttagattcaccgatcaactgatatccgctattacaagagtacgttatactagagccaaagtctactccaccaatatcaagttggccattatcgatatctcgaggcgatgggcatctccgtttaatacattgattaaagagtgtccatccagtacctgtacatttagcatatataggtcccattttttgctttctgtatccaggtagacatagatattctatagtgtctcctatgttgtaattagcattagcatcagtctccacactattcttaaatttcatattaatgggtcgtgacggaatagtacagcatgatagaacgcatcctattcccaacaatgtcaggaacgtcacgctctccaccttcatatttatttatccgtaaaaatgttatcctggacatcgtacaaataataaaaagcccatatatgttcgctattgtagaaattgtttttcacagttgctcaaaaacgatggcagtgacttatgagttacgttacactttggagtctcatctttagtaaacatatcataatattcgatattacgagttgacatatcgaacaaattccaagtatttgattttggataatattcgtattttgcatctgctataattaagatataatcaccgcaagaacacacgaacatctttcctacatggttaaagtacatgtacaattctatccatttgtcttccttaactatatatttgtatagataattacgagtctcgtgagtaattccagtaattacatagatgtcgccgtcgtactctacagcataaactatactatgatgtctaggcatgggagacttttttatccaacgatttttagtgaaacattccacatcgtttaatactacatatttctcatacgtggtataaactccacccattacatatatatcatcgtttacgaataccgacgcgcctgaatatctaggagtaattaagtttggaagtcttatccatttcgaagtgccgtgtttcaaatattctgccacacccgttgaaatagaaaattctaatcctcctattacatataactttccatcgttaacacaagtactaacttctgattttaacgacgacatattagtaaccgttttccattttttcgttttaagatctacccgcgatacggaataaacatgtctattgttaatcatgccgccaataatgtatagacaattatgtaaaacatttgcattatagaattgtctatctgtattaccgactatcgtccaatattctgttctaggagagtaatgggttattgtggatatataatcagagtttttaatgactactatattatgttttataccatttcgtgtcactggctttgtagatttggatatagttaatcccaacaatgatatagcattgcgcatagtattagtcataaacttgggatgtaaaatgttgatgatatctacatcgtttggatttttatgtatccactttaataatatcatagctgtaacatcctcatgatttacgttaacgtcttcgtgggataagatagttgtcagttcatcctttgataattttccaaattctggatcggatgtcaccgcagtaatattgttgattatttctgacatcgacgcattatatagttttttaattccatatcttttagaaaagttaaacatccttatacaatttgtgaaattaatattatgaatcatagtttttacacatagatctactacaggcggaacatcaattattatggcagcaactagtatcatttctacattgtttatggtgatgtttatcttcttccagcgcatatagtctaatagcgattcaaacgcgtgatagtttataccattcaatataatcgcttcatcctttagatggtgatcctgaatgcgtttaaaaaaattatacggagacgccgtaataatttccttattcacttgtataatttccccattgatagaaaatattacgctttccattcttaaagtactataagtaattatagtataatgtaaacgtttatatattcaatatttttataaaaatcattttgacattaattcctttttaaatttccgtctatcatctatagaaacgtattctatgaatttataaaatgcttttacgtgtcctatcgtaggcgatagaaccgctaaaaagcctatcgaatttctacaaaagaatctgttatatggtatagggagagtataaaacattaaatgtccgtacttattaaagtattcagtagccaatcctaactctttcgaatacttattaatggctcttgttctgtacgaatctatttttttgaacaacggacctagtggtatatcttgttctatgtatctaaaataatgtctgactagatccgttagtttaatatccgcagtcatcttgtctagaatggcaaatctaactgcgggtttaggctttagtttagtttctatatctacatctatgtctttatctaacaccaaaaatataatagctaatattttattacaatcatccggatattcttctacgatctcactaactaatgtttctttggttatactagtatagtcactatcggacaaataaagaaaatcagatgatcgatgaataatacatttaaattcatcatctgtaagatttttgagatgtctcattagaatattattagggttagtactcattatcattcggcagctattacttattttattatttttcaccatatagatcaatcattagatcatcaaaatatgtttcaatcatcctaaagagtatggtgaatgactcttcccatctaatttctgaacgttcaccaatgtctctagccactttggcactaatagcgatcattcgcttagcgtcttctatattattaactggttgatttaatctatctagcaatggaccgtcggacagcgtcattctcatgttcttaatcaatgtacatacatcgccgtcatctaccaattcatccaacaacataagctttttaaaatcatcattataataggtttgatcgttgtcatttctccaaagaatatatctaataagtagagtcctcatgcttagttaacaactattttttatgttaaatcaattagtacaccgctatgtttaatacttattcatattttagtttttaggattgagaatcaatacaaaaattaatgcatcattaattttagaaatacttagtttccacgtagtcaatgaaacatttgaactcatcgtacaggacgttctcgtacaggacgtaactataaaccggtttatatttgttcaagatagatacaaatccgataactttttttacgaattctacgggatccactttaaaagtgtcataccgggttctttttatttttttaaacagatcaatggtgtgatgttgattaggtcttttacgaatttgatatagaatagcgtttacatattctccataatggtcaatcgccatttgttcgtatgtcataaattctttaattatatgacactgtgtattatttagttcatccttgttcattgttaggaatctatccaaaatggcaattatactagaactataggtgcgttgtatacacatattgatgtgtctgtttatacaatccatgatatttggatccatgctactaccttcgggtaaaattgtagcatcatataccatttctagtactttaggttcattattatccattgcagaggacgtcatgatcgaatcataaaaaaatatattatttttatgttattttgttaaaaataatcatcgaatacttcgtaagatactccttcatgaacataatcagttacaaaacgtttatatgaagtaaagtatctacgatttttacaaaagtccggatgcataagtacaaagtacgcgataaacggaataataatagatttatctagtctatctttttctatagctttcatagttagatacatggtctcagaagtaggattatgtaacatcagcttcgataaaatgactgggttatttagtcttacacattcgctcatacatgtatgaccgttaactacagagtctacactaaaatgattgaacaatagatagtctaccattgtttcgtattcagatagtacagcgtagtacatggcatcttcacaaattatatcattgtctaatagatatttgacgcatcttatggatcccacttcaacagccatcttaaaatcatattgctttcctttatcattaataatttctagaacatcatctctatcataaaagatacaaatattaactgtttgatccgtaataacattgctagtcaatagcaatttgttaataagatgcgctgggctcaatgtcttaataagaagtgtaagaggactatctccgaatttgttttgtttattaacatccgttgatggaagtaaaagatctataatgtctacattcttgactgttttagagcatacaatatggagaggtgtatttccatcatgatctggttttgagggactaattcctagtttcatcatccatgagattgtagaagcttttggattgtctgacataagatgtctatgaatatgatttttgccaaatttatccactatcctggcttcgaatccgatggacattatttttttaaacactctttctgaaggatctgtacacgccaacaacggaccacatccttcttcatcaaccgagttgttaatcttggctccatactgtaccaataaatttattctctctatgacttcatcatctgttcccgagagataatatagaggtgttttatgctgtttatcacacgcgtttggatctgcgccgtgcgtcagcagcatcgcgactattctattattattaattttagaagctatatgcaatggataatttccatcatcatccgtctcatttggagagtatcctctatgaagaagttcttcgacaaatcgttcatctagtcctttaattccacaatacgcatgtagaatgtgataattatttccagaaggttcgatagcttgtagcatattcctaaatacatctaaatttttactattatatttggcataaagagatagataatactcggccgacataatgttgtccattgtagtataaaaattaatatttctatttctatttctgtatatttgcaacaatttactctctataacaaatatcataacttagtttttttatgtcaagaaggcactggtttagttcatctataaatgtcacgccataactaccacgcatgccatactcagaattatgataaagatatttatccttggggtgtaggtaatggggattaatctttgttggatcagtctctaagttaacacatgtcacacatgatccatttatagttatatcacacgatgatgatttatgaattgattccggaagatcgctatcgtattttgtggttccacaattcatttccatacatgttattgtcacactaatattatgatgaactttatctagccgctgagtggtaaacaacagaacagatagtttattatctttaccaacaccctcagccgctgccacaaatctctgatccgtatccatgatggtcatgtttatttctagtccgtatccagtcaacactatgttagcatttctgtcgatatagctttcactcatatgacactcaccaataatagtagaattaatgtcgtaatttacaccaatagtgagttcggcggcaaagtaccaataccggtaatcttgtcgaggaggacatatagtattcttgtattctaccgaatacccgagagatgcgatacaaaagagcaagactaatttgtaaaccatcttactcaaaatatgtaacaatagtacgatgcaatgagtaagacaataggaaatctatcttatatacacataattattctatcaattttaccaattagttagtgtaatgttaacaaaaatgtgggagaatctaattagtttttctttacacaattgacgtacatgagtctgagttccttgtttttgctaattatttcatccaatttattattcttgacgatatcgagatcttttgtataggagtcaaacttgtattcaacatgcttttctataatcattttagctatttcggcatcatccaatagtacattttccagattagcagaatagatattaatgtcgtatttgaacagagcctgtaacatctcaatgtctttattatctatagccaatttaatgtccggaatgaagagaagggaattattggtgtttgtcgacgtcatatagtcgagcaagagaatcatcatatccacgtgtccattttttatagtgatgtgaatacaactaaggagaatagccagatcaaaagtagatggtatctctgaaagaaagtaggaaacaatacttacatcattaagcatgacggcatgataaaatgaagttttccatccagttttcccatagaacatcagtctccaatttttcttaacaaacagttttaccgtttgcatgttaccactatcaaccgcataatacaatgcggtgtttcccttgtcatcaaattgtgaatcatccagtccactgaatagcaaaatctttactattttggtatcttccaatgtggctgcctgatgtaatggaaattcattctctagaagatttttcaatgctccagcgttcaacaacgtacatactagacgcacgttattatcagctattgcataatacaaggcactatgtccatggacatccgccttaaatgtatctttactagagagaaagcttttcagctgcttagacttccaagtattaattcgtgacagatccatgtctgaaacgagacgctaattagtgtatattttttcattttttataattttgtcatattgcaccagaattaataatatctttaatagatctgattagtagatacatggctatcgcaaaacaacatatacacatttaataaaaataatatttattaagaaaattcagatttcacgtacccatcaatataaataaaataatgattccttacaccgtacccatattaaggagattccaccttacccataaacaatataaatccagtaatatcatgtctgatgatgaacacaaatggtgtattaaattccagtttttcaggagatgatctcgccgtagctaccataatagtagatgcctctgctacagttccttgttcgtcgacatctatctttgcattctgaaacattttataaatatataatgggtccctagtcatatgtttaaacgacgcattatctggattaaacatactaggagccatcatttcggctatcgacttaatatccctcttattttcgatagaaaatttagggagtttaagattgtacactttattccctaattgagacgaccaatagtctaattttgcagccgtgatagaatctgtgaaatgggtcatattatcacctattgccaggtacatactaatattagcatccttatacggaaggcgtaccatgtcatattctttgtcatcgattgtgattgtatttccttgcaatttagtaactacgttcatcatgggaaccgttttcgtaccgtacttattagtaaaactagcattgcgtgttttagtgatatcaaacggatattgccatatacctttaaaatatatagtattaatgattgcccatagagtattattgtcgagcatattagaatctactacattagacataccggatctacgttctactatagaattaattttattaaccgcatctcgtctaaagtttaatctatataggccgaatctatgatattgttgataatacgacggtttaatgcacacagtattatctacgaaactttgataagttagatcagtgtacgtatatttagatgttttcagcttagctaatcctgatattaattctgtaaatgctggacccagatctctttttctcaaatccatagtcttcaataattctattctagtattacctgatgcaggcaatagcgacataaacatagaaaacgaataaccaaacggtgagaagacaatattatcatcttgaatatttttatacgctactataccggcattggtaaatccttgtagacgataggcggacgctgaacacgctaacgatagtatcaataacgcaatcatgattttatggtattaataattaaccttatttttatgttcggtataaaaaaattattgatgtctacacatccttttgtaattgacatctatatatccttttgtataatcaactctaatcactttaacttttacagttttccctaccagtttatccctatattcaacatatctatccatatgcatcttaacactctctgccaagatagcttcagagtgaggatagtcaaaaagataaatatatagagcataatcattctcgtatactctgccctttattacatcacccgcattgggcaacgaataacaaaatgcaagcatcttgttaacgggctcgtaaattgggataaaaattatgtttttattgtcttatatctattttattcaagagaatattcaggaatttctttttccggttgtatctcgtcgcagtatatatcatttgtacattgtttcatattttttaatagtttacaccttttagtaggactagtatcgtacaattcatagctgtattttgaattccaatcacgcataaaaatatcttccaattgttgacgaagacctaatccatcatccggtgtaatattaatagatgctccacatgtatccgtaaagtaatttcctgtccaatttgaggtacctatataggccgttttatcggttaccatatatttggcatggtttaccctagaatacggaatgggaggatcagcatctggtacaataaatagctttacttctatatttatgtttttagattttagcatagcgatagatcttaaaaagtttctcatgataaacgaagatcgttgccagcaactaatcaatagcttaacggatacttgtctgtctatagcggatcttcttaattcatcttctatataaggccaaaacaaaattttacccgccttcgaataaataatagggataaagttcataacagatacataaacgaatttactcgcatttctaatacatgacaataaagcggttaaatcattggttctttccatagtacatagttgttgcggtgcagaagcaataaatacagagtgtggaacgccgcttacgttaatactaagaggatgatctgtattataatacgacggataaaagtttttccaattatatggtagattgttaactccaagataccagtatacctcaaaaatttgagtgagatccgctgccaagttcctattattgaagatcgcaatacccaattccttgacctgagttagtgatctccaatccatgttagcgcttcctaaataaatatgtgtattatcagatatccaaaattttgtatgaagaactcctcctaggatatttgtaatatctatgtatcgtacttcaactccggccatttgtagtctttcaacatcctttaatggtttgttagatttattaacggctactctaactcgtactcctcttttgggtaattgtacaatctcgtttaatattatcgtgccgaaattcgtacccacttcatccgataaactccaataaaaagatgatatatctagtgtttttgtggtattggatagaatttccctccacatgttaaatgtagacaaatatactttatcaaattgcatacctataggaatagtttctgtaatcactgcgattgtattatccggattcattttatttgttaaaagaataatcctatatcacttcactctattaaaaatccaagtttctatttctttcatgactgattttttaacttcatccgtttccttatgaagatgatgtttggcaccttcataaatttttatttctctattacaatttgcatgttgcatgaaataatatgcacctaaaacatcgctaatcttattgtttgttccctggagtatgagagtcggggggtgttaatcttggaaattatttttctaaccttgttggtagccttcaagacctgactagcaaatccagccttaattttttcatgattgactaatgggtcgtattggtatttataaactttatccatatctctagatactgattctggacatagctttccgactggcgcatttggtgtgatggttcccataagtttggcagctagcagattcagtcttgaaacagcatctgcattaactagaggagacattagaatcattgctgtaaacaagtttggattatcgtaagaggctagctcccatggaatgacccaataagtagatttaatagttaccacgtgctgtaccaaagtcatcaatcatcattttttcaccattacttcttccatgtccaatatgatcatgtgagaatactaaaattcctaacgatgatatgttttcagctagttcgtcataacgtccagaatgtttaccagctccatgacttatgaatactaatgccttaggatatgtaataggtttccaatatttacaatatatgtaatcattgtccagattgaacatacagtttgcactcatgattcacgttatataactatcaatattaacagttcgtttgatgatcatattatttttatgttttattgataattgtaaaaacatacaattaaatcaatatagaggaaggagacggctactgtcttttgtaagatagtcatggcgactaaattagattatgaggatgctgttttttactttgtggatgatgataaaatatgtagtcgcgactccatcatcgatctaatagatgaatatattacgtggagaaatcatgttatagtgtttaacaaagatattaccagttgtggaagactgtacaaggaattgatgaagttcgatgatgtcgctatacggtactatggtattgataaaattaatgagattgtcgaagctatgagcgaaggagaccactacatcaattttacaaaagtccatgatcaggaaagtttattcgctaccataggaatatgtgctaaaatcactgaacattggggatacaaaaagatttcagaatctagattccaatcattgggaaacattacagatttgatgaccgacgataatataaacatcttgatactttttctagaaaaaaaattgaattgatgatataggggtcttcataacgcataattattacgttagcattctatatccgtgttaaaaaaaattatcctatcatgtatttgagagttttatatgtagcaaacatgatagctgtgatgccaataagctttagatattcacgcgtgctagtgttagggatggtattatctggtggtgaaatgtccgttatataatctacaaaacaatcatcgcatatagtatgcgatagtagagtaaacatttttatagtttttactggattcatacatcgtctacccaattcggttataaatgaaattgtcgccaatcttacacccaaccccttgttatccattagcatagtattaacttcgttatttatgtcataaactgtaaatgattttgtagatgccatatcatacatgatattcatgtccctattataatcattactaactttatcacaatatatgttgataatatctatatatgatctagtctttgtgggcaactgtctatacaagtcgtctaaacgttgtttactcatatagtatcgaacagccatcattacatggtcccgttccgttgatagataatcgagtatgttagtggacttgtcaaatctatataccatattttctggaagtggatatacatagtcgtgatcaacattattgctagcctcatcttctatatcctgtactataccattatctatatcatctacataatctatgatattattacacataaacatcgacaacatactattgtttattatctaagtcctgttgatccaaacccttgatctcctctatttgtactatctagagattgtacttcttccagttctggataatatatacgttgatagattagctgagctattctatctccagtatttacattaaacgtacattttccattattaataagaatgactcctatgtttcccctataatcttcgtctattacaccacctcctatatcaatgccttttagtgacagaccagacctaggagctattctaccatagcagaacttaggcatggacatactaatatctgtcttaattaactgtctttctcctggagggatagtataatcgtaagcgctatacaaatcatatccggcagcacccggcgattgcctagtaggagatttagctctgttagtttccttaacaaatctaactggtgagttaatattcatgttgaacataaaactaatattttatttcaaaattatttaccatcccatatattccatgaataagtgtgatgattgtacacttctatagtatctatatacgatccacgataaaatcctcctatcaatagcagtttattatccactatgatcaattctggattatccctcggataaataggatcatctatcagagtccatgtattgctggattcacaataaaattccgcatttctaccaaccaagaataaccttctaccgaacactaacgcgcatgatttataatgaggataataagtggatggtccaaactgccactgatcatgattgggtagcaaatattctgtagttgtatcagtttcagaatgtcctcccattacgtatataacattgtttatggatgccactgctggattacatctaggtttcagaagactcggcatattaacccaagcagcatccccgtggaaccaacgctcaacagatgtgggatttggtagacctcctactacgtataatttattgttagcgggtatcccgctagcatacagtctggggctattcatcggaggaattggaatccaattgtttgatatataatttacagctatagcattgttatgtatttcattgttcatccatccaccgatgagatatactacttctccaacatgagtacttgtacacatatggaatatatctataatttgatccatgttcataggatactctatgaatggatacttgtatgatttgcgtggttgtttatcacaatgaaatattttggtacagtctagtatccattttacattatttatacctctgggagaaagataatttgacctgattacatttttgataaggagtagcagatttcctaatttatttcttcgcctcatataccacttaatgacaaaatcaactacataatcctcatctggaacatttagttcatcgctttctagaataagtttcatagatagataatcaaaattgtctatgatgtcatcttccagttccaaaaagtgtttggcaataaagtttttagtatgacataagagattggatagtccgtattctatacccatcatgtaacactcgacacaatattcctttctaaaatctcgtaagataaagtttatacaagtgtagatgataaattctacagaggttaatatagaagcacgtaataaattgacgacgttatgactatctatatatacctttccagtatatgagtaaataactatagaagttaaactgtgaatgtcaaggtctagacaaacccttgtaactggatctttatttttcgtgtatttttgacgtaaatgtgtgcgaaagtaaggagataactttttcaatatcgtagaattgactattatattgcctcctatggcatcaataattgttttgaatttcttagtcatagacaatgctaatatattcttacagtacacagtattgacaaatatcggcatttatgtttctttaaaagtcaacatctagagaaaaatgattatctttttgagacataactcccattttttggtattcacccacacgtttttcgaaaaaattagtttttccttccaatgatatattttccatgaaatcaaacggattggtaacattataaatttttttaaatcccaattcagaaatcaatctatccgcgacgaattctatatatgttttcatcatttcacaattcattcctataagtttaactggaagagccgcagtaagaaattcttgttcaatggatactgcatctgttataatagatctaacggtttcttcactcggtggatgcaataaatgtttaaacatcaaacatgcgaaatcgcagtgcagaccctcgtctctactaattagttcgttggaaaacgtgagtccgggcattaggccacgctttttaagccaaaatatggaagcgaatgatccagaaaagaaaattccttctactgcagcaaaggcaataagtctctctccataaccggcgctgtcatgtatccacttttgagcccaatcggccttcttttttacacaaggcatcgtttctatggcattaaagagatagtttttttcattactatctttaacataagtatcgatcaaaagactatacatttccgaatgaatgttttcaatggccatctgaaatccgtagaaacatctagcctcggtaatctgtacttctgtacaaaatcgttccgccaaattttcattcactattccgtcactggctgcaaaaaacgccaatacatgttttataaaatatttttcgtctggtgttagtttattccaatcattgatatctttagatatatctacttcttccactgtccaaaatgatgcctctgcctttttatacatgttccagatgtcatgatattggattgggaaaataacaaatctatttggatttggtgcaaggatgggttccataactaaattaacaataacaataaattttttttcagttatctatatgcctgtacttggattttttgtacatcgatatcgccgcaatcactacaataattacaagtattattgatagcattgttattagtactatcataattaaattatctacattcatgggtgctgaataatcgttattatcatcattatcattttgtaattgtgacatcatactagataaatcgtttgcgagattgttgtgggaagcgggcatggaggatgcattatcattattatttaacgccttccatttggattcacaaatgttacgcacattcaacattttatggaaactataattttgtgaaaacaaataacaagaaaactcgtcatcgttcaaatttttaacgatagtaaaccgattaaacgtcgagctaatttctaacgctagcgactctgttggatatgggtttccagatatatatcttttcagttcccctacgtatctataatcatctgtaggaaatggaagatatttccatttatctactgttcctaatatcatatgtggtggtgtagtagaaccattaagcgcgaaagatgttatttcgcatcgtattttaacttcgcaataatttctggttagataacgcactctaccagtcaagtcaatgatattagcctttacagatatattcatagtagtcgtaacgatgactccatcttttagatgcgatactcctttgtatgtaccagaatcttcgtacctcaaactcgatatatttaaacaagttaatgagatattaacgcgttttatgaatgatgatatataaccagaagttttatcctcggtggctagcgctataaccttatcattataataccaactagtgtgattaatatgtgacacgtcagtgtgggtacaaatatgtacattatcgtctacgtcgtattcgatacatccgcatacagccaacaaatataaaatgacaaatactctaacgccgttcgtacccatcttgatgcggtttaataaatgttttgatttcaatttattgtaaaaaaagattcggttttatactgttcgatattctcattgcttatattttcatctatcatctccacacagtcaaatccgtggttagcatgcacctcatcaaccggtaaaagactatcggactcttctatcattataactctagaatatttaatttggtcattattaatcaagtcaattatcttatttttaacaaacgtgagtattttactcattttttataaaaacttttagaaatatacagactctatcgtgtgtctatatcttctttttatatccaatgtatttatgtctgatttttcttcatttatcatatataatggtccaaattctacacgtgcttcggattcatccagatcattaaggttcttataattgtaacatccttctcttccctcttctacatcttccttcttattcttattcttagcgtcacagaatctaccacagcaggatcccatgacgagcgtcatattaaactaatccattttcaattataatatatgattagtaatgaccattaaaataaaaaatattcttcataaccggcaagaaagtgaaaagttcacattgaaactatgtcagtagtatacatcatgaaatgatgatatatatatactctattttggtggaggattatatgatataattcgtggataatcatttttaagacacatttctttattcgtaaatcttttcacgttaaatgagtgtccatattttgcaatttcttcatatgatggcggtgtacgtggacgaggctgctcctgttcttgttgtggtcgccgactgtcgtgtctgcgtttagatccctccattatcgcgattgcgtagatggagtactattttataccttgtaattaaatttttttattaattaaacgtataaaaacgttccgtatctgtatttaagagccagatttcgtctaatagaacaaatagctacagtaaaaataactagaataattgctacacccactagaaaccacggatcgtaatacggcaatcggttttcgataataggtggaacgtatattttatttaaggacttaacaattgtctgtaaaccacaatttgcttccgcggatcctgtattaactatctgtaaaagcatatgttgaccgggcggagccgaacattctccgatatctaatttctgtatatctataatattattaacctccgcatacgcattacagttcttttctagcttggataccgcactaggtacatcgtctagatctattcctatttcctcagcgatagctcttctatccttttccggaagcaatgaaatcacttcaataaatgattcaaccatgagtgtgaaactaagtcgagaattactcatgcatttgttagttattcggagcgcgcaatttttaaactgtcctataacctctcctatatgaatagcacaagtgacattagtagggatagaatgttgagctaatttttgtaaataactatctataaaaagattatacaaagttttaaactctttagtttccgccatttatccagtctgagaaaatgtctctcataataaatttttccaagaaactaattgggtgaagaatggaaacctttaatctatatttatcacagtctgttttggtacacatgatgaattcttccaatgccgtactaaattcgatatctttttcgatttctggatatgtttttaataaagtatgaacaaagaaatggaaatcgtaataccagttatgtttaactttgaaattgttttttattttcttgttaatgattccagccacttgggaaaagtcaaagtcgtttaatgccgatttaatacgttcattaaaaacaaactttttatcctttagatgaattattattggttcattggaatcaaaaagtaagatattatcgggtttaagatctgcgtgtaaaaagttgtcgcaacagggtagttcgtagattttaatgtataacagagccatctgtaaaaagataaactttatgtattgtaccaaagatttaaatcctaatttgatagctaactcggtatctactttatctgccgaatacagtgctaggggaaaaattataatgtttcctctttcatattcgtagttagttctcttttcatgttcgaaaaagtgaaacatgcggttaaaatagtttataacattaatattactgttaataactgccggataaaagtgggatagtaatttcacgaatttgatactgtcctttctctcgttaaacgcctttaaaaaaactttagaagaatatctcaatgagagttcctgaccatccatagtttgtatcaataatagcaacatatgaagaacacgtttatacagagtatgtaaaaatgttaatttatagtttaatcccatggcccacgcacacacgattaattttttttcatctccctttagattgttgtatagaaatttgggtactgtgaactccgccgtagtttccatgggactatataattttgtggcctcgaatacaaattttactacatagttatctatcttaaagactataccatatcctcctgtagatatgtgataaaaatcgtcgtttataggataaaatcgtttatccttttgttggaaaaaggatgaattaatgtaatcattctcttctatctttagtagtgtttccttattaaaattcttaaaataatttaacaatctaactgacggagcccaattttggtgtaaatctaattgggacattatattgttaaaatacaaacagtctcctaatataacagtatctgataatctatggggagacatccattgatattcaggggatgaatcattggcaacacccatttattgtacaaaaagccccaatttacaaacgaaagtccaggtttgatagagacaaacaattaactattttgtctctgtttttaacacctccacagtttttaatttctttagtaatgaaattattcacaatatcagtatcttctttatctaccagagattttactaacttgataaccttggctgtctcattcaatagggtagtaatatttgtatgtgtgatattgatatctttttgaattgtttcttttagaagtgattctttgatggtgccagcatacgaattacaataatgcagaaactcggttaacatgcaggaattatagtaagccaattccaattgttgcctgtgttgtattagagtgtcaatatgagcaatggtgtccttgcgtttctctgatagaatgcgagcagcgattttggcgttatcatttgacgatatttctggaatgacgaatcctgtttctactaactttttggtaggacaaagtgaaacaatcaagaagatagcttctcctcctatttgtggaagaaattgaactcctctagatgatctactgacgatagtatctccttgacagatattggaccgaattacagaagtacctggaatgtaaagccctgaaaccccctcattttttaagcagattgttgccgtaaatcctgcactatgcccaagatagagagctcctttggtgaatccatctctatgtttcagtttaaccaagaaacagtcagctggtctaaaatttccatctctatctaatacagcatctaacttgatgtcaggaactatgaccggtttaatgttatatgtaacattgagtaaatccttaagttcataatcatcactgtcatcagttatgtacgatccaaacaatgtttctaccggcatagtggatacgaagatgctatccatcagaatgtttccctgattagtattttctatatagctattcttctttaaacgattttccaaatcagtaactatgttcatttttttaggagtaggacgcctagccagtatggaagaggattttctagatcctctcttcaacatctttgatctcgatggaatgcaaaaccccatagtgaaacaaccaacgataaaaataatattgtttttcactttttataattttaccatctgactcatggattcattaatatctttataagagctactaacgtataattctttataactgaactgagatatatacaccggatctatggtttccataattgagtaaatgaatgctcggcaataactaatggcaaatgtatagaacaacgaaattatactagagttgttaaagttaatattttctatgagctgttccaataaattatttgttgtgactgcgttcaagtcataaatcatcttgatactatccagtaaaccgtttttaagttctggaatattatcatcccattgtaaagcccctaattcgactatcgaatatcctgctctgatagcagtttcaatatcgacggacgtcaatactgtaataaaggtggtagtattgtcatcatcgtgataaactacgggaatatggtcgttagtaggtacggtaactttacacaacgcgatatataactttccttttgtaccatttttaacgtagttgggacgtcctgcagggtattgttttgaagaaatgatatcgagaacagatttgatacgatatttgttggattcctgattattcactataatataatctagacagatagatgattcgataaatagagaaggtatatcgttggtaggataatacatccccattccagtattctcggatactctattgatgacactagttaagaacatgtcttctattctagaaaacgaaaacatcctacatggactcattaaaacttctaacgctcctgattgtgtctcgaatgcctcgtacaaggatttcaaggatgccatagattctttgaccaacgatttagaattgcgtttagcatctgatttttttattaaatcgaatggtcggctctctggtttgctaccccaatgataacaatagtcttgtaaagataaaccgcaagaaaatttatacgcatccatccaaataaccctagcaccatcggatgatattaatgtattattatagattttccatccacaattattgggccagtatactgttagcaacggtatatcgaatagattactcatgtaacctactagaatgatagttcgtgtactagtcataatatctttaatccaatctaaaaaatttaaaattagattttttacactgttaaagttaacaaaagtattacccgggtacgtggatatcatatatggcattggtccattatcagtaatagctccataaactgatacggcgatggtttttatatgtgtttgatctaacgaggaagaaattcgcgcccacaattcatctctagatatgtatttaatatcaaacggtaacacatcaatttcgggacgcgtatatgtttctaaatttttaatccaaatataatgatgacctatatgccctattatcatactgtcaactatagtacacctagggaacttacgatacatctgtttcctataatcgttaaattttacaaatctataacatgctaaaccttttgacgacagccattcattaatttctgatatggaatctgtattctcgataccgtatcgttctaaagccagtgctatatctccctgttcgtgggaacgctttcgtataatatcgatcaacggataatctgaagtttttggagaataatatgactcatgatctatttcgtccataaacaatctagacataggaattggaggcgatgatcttaattttgtgcaatgagtcgtcaatcctataacttctaatcttgtaatattcatcatcgacataatactatctatgttatcatcgtatattagtataccatgaccttcttcatttcgtgccaaaatgatatacagtcttaaatagttacgcaatatctcaatagtttcataattgttagctgttttcatcaaggtttgtatcctgtttaacatgatggcgttctataacgtctctattttctatttttaattttttaaatttttaacgatttactgtggctagatacccaatctctctcaaatatttttttagcctcgcttacaagctgtttatctatactattaaaactgacgaatccgtgattttggtaatgggttccgtcgaaatttgccgaagtgatatgaacatattcgtcgtcgactatcaacaattttgtattattctgaatagtgaaaaccttcacagatagatcattttgaacacacaacgcatctagacttttggcggttgccatagaatatacgtcgttcttatcccaattaccaactagaagtctgatcttaactcctctattaatggctgcttctataatggagttgtaaatgtcgggccaatagtagctattaccgtcgacacgtgtagtgggaactatggccaaatgttcaatatctatactagtcttagctgacctgagtttatcaataactacatcggtatctagatctctagaatatcccaataggtgttccggagaatcagtaaagaacactccacctataggattcttaatatgatacgcagtgctaactggcaaacaacaagccgcagagcataaattcaaccatgaattttttgcgctattaaaggctttaaaagtatcaaatcttctacgaagatctgtggccagcgggggataatcagaatatacacctaacgttttaatcgtatgtatagatcctccagtaaatgacgcgtttcctacataacatctttcatcatctgacacccaaaaacaaccgagtagtagtcccacattattttttttatctatattaacggttataaaatttatatccgggcagtgactttgtagctctcccagatttcttttccctcgttcatctagcaaaactattattttaatccctttttcagatgcctcttttagtttatcaaaaataagcgctcccctagtcgtactcagaggattacaacaaaaagatgctatgtatatatatttcttagctagagtgataatttcgttaaaacattcaaatgttgttaaatgatcggatctaaaatccatattttctggtagtgtttctaccagcctacattttgctcccgcaggtaccgatgcaaatggccacatttagttaacataaaaacttatacatcctgttctatcaacgattctagaatatcatcggctatatcgctaaaattttcatcaaagtcgacatcacaacctaactcagtcaatatattaagaagttccatgatgtcatcttcgtctatttctatatccgtatccattgtagattgttgaccgattatcgagtttaaatcattactaatactcaatccttcagaatacaatctgtgtttcattgtaaatttataggcggtgtatttaagttggtagattttcaattatgtattaatatagcaacagtagttcttgctcctccttgattctagcatcctcttcattattttcttctacgtacataaacatgtccaatacgttagacaacacaccgacgatggcggccgctacagacacgaatatgactaaaccgatgaccatttaaaaacccctctctagctttcacttaaactgtatcgatcattcttttagcacatgtataatataaaaacattattctatttcgaatttaggcttccaaaaatttttcatccgtaaaccgataataatatatatagacttgttaatagtcggaataaatagattaatgcttaaactatcatcatctccacgattagagatacaatatttacattctttttgctgtttcgaaactttatcaatacacgttaatacaaacccaggaaggagatattgaaactgaggctgttgaaaatgaaacggtgaatacaataattcagataatgtaaaatcatgattccgtattctgatgatattagaactgctaatggatgtcgatggtatgtatctaggagtatctattttaacaaagcatcgatttgctaatatacaattatccttttgattaattgttattttattcatattcttaaaaggtttcatatttatcaattcttctacattaaaaatttccatttttaatttatgtagccccgcaatactcctcattacgtttcattttttgtctataatatccattttgttcatctcggtacatagattatccaattgagaagcgcatttagtagttttgtacattttaagtttattgacgaatcgtcgaaaactagttatagttaacattttattatttgataccctgatattaatacccctgccgttactattatttataactgatgtaatccacgtaacattggaattaactatcgatagtaatgcatcgacgcttccaaaattgtctattataaactcaccgataatttttttattgcatgttttcatattcattaggattatcaaatctttaatcttattacgattgtatgcgttgatattacaagacgtcattctaaaagacggaggatctccatcaaatgccagacaatcacgtacaaagtacatggaaataggttttgttctattgcgcatcatagatttatatagaacacccgtagaaatactaatttgttttactctataaaatactaatgcatctatttcatcgttttgtataacgtctttccaagtgtcaaattccaaatttttttcattgatagtaccaaattcttctatctctttaactacttgcatagataggtaattacagtgatgcctacatgccgttttttgaaactgaatagatgcgtctagaagcgatgctacgctagtcacaatcaccactttcatatttagaatatatatatgtaaaaatatagtagaatttcattttgtttttttctatgctataaatgaattctcattttgcatctgctcatactccgttttatattaataccaaagaaggaagatatctggttctaaaagccgttaaagtatgcgatgttagaactgtagaatgcgaaggaagtaaagcttcctgcgtactcaaagtagataaaccctcatcgcccgcgtgtgagagaagaccttcgtccccgtccagatgcgagagaatgaataaccctggaaaacaagttccgtttatgaggacggacatgctacaaaatatgttcgcggctaatcgcgataatgtagcttctagacttttgtcctaaaatactattatatccttttcgatattaataaatccgtgtcgtccaggttttttatctctttcagtatgtgaatagataggtattttatctctattcatcatcgaatttaagagatccgataaacattgtttgtattctccagatgtcagcatctgatacaacaatatatgtgcacataaacctctggcacttatttcatgtaccttccccttatcactaaggagaatagtatttgagaaatatgtatacatgatattatcatgaattagatatacagaatttgtaacactctcgaaatcacacgatgtgtcggcgttaagatctaatatatcactcgataacacattttcatctagatacactagacattttttaaagctaaaatagtctttagtagtaacagtaactatgcgattattttcatcgatgatacatttcatcggcatattattacgcttaccatcaaagactataccatgtgtatatctaacgtattctagcatggttgccatacgcgcattaaacttttcaggatctttggatagatcttccaatctatctatttgagaaaacatttttatcatgttcaatagttgaaacgtcggatccactatatagatattatctataaagattttaggaactacgttcatggtatcctggcgaatattaaaactatcaatgatatgattatcgttttcatcttttatcaccatatagtttctaagatatgggattttacttaatataatattatttcccgtgataaattttattagaaaggccaaatctataagaaaagtcctagaattagtctgaagaatatctatatcgccgtatagtatatttggattaattagatatagagaatatgatccgtaacatatacaacttttattatggcgtctaagatattcttccatcaacttattaacatttttgactagggaagatacattatgacgtcccattacttttgccttgtctattactgcgacgttcatagaatttagcatatctcttgccaattcttccattgatgttacattataagaaattttagatgaaattacatttggagctttaatagtaagaactcctaatatgtccgtgtatgtggtcactaatacagattgtagttctataatcgtaaataatttacctatattatatgtttgagtctgtttagaaaagtagctaagtatacgatcttttatttctgatgcagatgtattaacatcggaaaaaaatctttttttattcttttttactaaagatacaaatatgtctttgttaaaaacagttattttctgaatatttctagcttgtaattttaacatatgatattcgttcacactaggtactctgcctaaataggtttctataatctttaatgtaatattaggaaaagtattctgatcaggattcctattcattttgaggatttaaaactctgattattgtctaatatggtctctacgcaaactttttcacagagcgatagagtttttgataactcgtttttcttaagaaatataaaactactgtctccagagctcgctctatcttttattttatctaattcgatacaaactcctgatactggttcagaaagtaattcattaattttcagtcctttatagaagatatttaatatagataatacaaaatcttcagtttttgatatcgatctgattgatcctagaactagatatattaataacgtgctcattaggcagtttatggcagcttgataattagatatagtatattccagttcatatttattagataccgcattgcccagattttgatattctatgaattcctctgaaaataaatccaaaataactagacattctattttttgtggattagtgtactctcttccctctatcatgttcactactggtgtccacgatgataaatatctagagggaatataatatagtccataggatgccaatctagcaatgtcgaataactgtaattttattcttcgctcttcattatgaattgattcttgaggtataaacctaacacaaattatattattagacttttcgtatgtaatgtctttcatgttataagtttttaatcctggaatagaatctattttaatgaggcttttaaacgcagagttctccaacgagtcaaagcataatactctgttgtttttcttatatacgatgttacgattttcttctttgaatggaataggtttttgaattagtttataattacaacataatagataaggaagtgtgcaaatagtacgcggaaaaaacataatagctcccctgttttcatccatggttttaagtaaatgatcactggcttctttagtcaatggatattcgaacattaaccgtttcatcatcattggacagaatccatatttcttaatgtaaagagtgatcaaatcattgtgtttattgtaccatcttgttgtaaatgtgtattcggttatcggatctgctcctttttctattaaagtatcgatgtcaatctcgtctaagaattcaactatatcgacatatttcatttgtatacacataaccattactaacgtagaatgtataggaagagatgtaacgggaacagggtttgttgattcgcaaactattctaatacataattcttctgttaatacgtcttgcacgtaatctattatagatgccaagatatctatataattattttgtaagatgatgttaactatgtgatctatataagtagtgtaataattcatgtattttgatatatgttccaactctgtctttgtgatgtctagtttcgtaatatctatagcatcctcaaaaaatatattcgcatatattcccaagtcttcagttctatcttctaaaaaatcttcaacgtatggaatataataatctattttacctcttctgatatcattaatgatatagtttttgacactatcttctgtcaattgattcttattcactatatctaagaaacggatagcgtccctaggacgaactactgccattaatatctctattatagcttctggacataattcatctattataccagaattaatgggaactattccgtatctatctaacatagttttaagaaagtcagaatctaagacttgatgttcatatattggttcatacatgaaatgatctctattgatgatagtgactatttcattctctgaaaattggtaactcattctatatatgctttccttgttgatgaaggatagaatatactcaatagaatttgtaccaacaaactgttctcttatgaatcgtatatcatcatctgaaataatcatgtaaggcatacatttaacaattagagacttgtctcctgttatcaatatactattcttgtgataatttatgtgtgaggcaaatttgtccacgttctttaattttgttatagtagatatcaaatccaatggagctacagttcttggcttaaacagatatagtttttctggaacaaattctacaacattattataaaggactttgggtagataagtgggatgaaatcctattttaattaatgcgatagccttgtcctcgtgcagatatccaaacgcttttgtgatagtatggcattcattgtctagaaacgctctacgaatatctgtgacagatatcatctttagagaatatactagtcgcgttaatagtactacaatttgtattttttaatctatctcaataaaaaaattaatatgtatgattcaatgtataactaaactactaactgttattgataactagaatcagaatctaatgatgacgtaaccaagaagtttatctactgccaatttagctgcattatttttagcatctcgtttagattttccatcggccttatcgaatactcttccgtcgatgtctacacaggcataaaatgtaggagagttactaggcccaactgattcaatacgaaaagaccaatctctcctagtaatttggcagtactcattaataacggtgacagggttagcatctttccaatcaataatttttttagccggaataacatcatcaaaagacttatgatcctctctcattgatttttcgcgggatacatcatctattatgacgtcagccatagcatcagcatccggcttatccgcctccgttgtcataaaccaacgaggaggaatatcgtcggagctgtacaccatagcactacgttgaagatcgtacagagctttattaacttctcgcttctccatattaagttgtctagttagttgtgcagcagtagctccttcgattccaatgtttttaatagccgcacacacaatctctgcgtcagaacgctcgtcaatatagatcttagacatttttagagagaactaacgcaaccagcaataaaactgaacctactttatcatttttttattcatcatcctctggtggttcgtcgttcctatcaaatgtagctctgattaacccgtcatctataggtgatgctggttctggagattctggaggagatggattattatctggaagaatctctgttatttccttgttttcatgtatcgattgcgttgtaacattaagattgcgaaatgctctaaatttgggaggcttaaagtgttgtttgcaatctctacacgcgtgtctaactagtggaggttcgtcagctgctctagtttgaatcatcatcggcgtagtattcctacttttacagttaggacacggtgtattgtatttctcgtcgagaacgttaaaataatcgttgtaactcacatcctttattttatctatattgtattctactcctttcttaatgcattttataccgaataagagatagcgaaggaattctttttcggtgccgctagtacccttaatcatatcacatagtgttttatattccaaatttgtggcaatagacggtttatttctatacgatagtttgtttctggaatcctttgagtattctataccaatattattctttgattcgaatttagtttcttcgatattagattttgtattacctatattcttgatgtagtactttgatgatttttccatggcccattctattaagtcttccaagttggcatcatccacatattgtgatagtaattctcggatatcagtagcggctaccgccattgatgtttgttcattggatgagtaactactaatgtatacattttccatttataacacttatgtattaactttgttcatttatattttttcattattatgttgatattaacaaaagtgaatatatatatgttaataattgtattgtggttatacggctacaattttataatgagtgaaagtcagtgtccgatgatcaatgacgatagctttactctgaaaagaaagtatcaaatcgatagtgcggagtcaacaataaaaatggataagaagaggataaagtttcagaatagagccaaaatggtaaaagaaataaatcagacaataagagcagcacaaactcattacgagacattgaaactaggatacataaaatttaagagaatgattatgactactactctagaagatatagcaccatctattccaaataatcagaaaacttataaactattctcggacatttcagccatcggcaaagcatcacagaatccgagtaagatggtatatgctctgctgctttacatgtttcccaatttgtttggagatgatcatagattcattcgttatagaatgcatccaatgagtaaaatcaaacacaagatcttctctcctttcaaacttaatcttattagaatattagtggaagaaagattctataataatgaatgcagatctaataaatggagaataattggaacacaagttgataaaatgttgatagctgaatctgataaatatacaatagatgcaaggtataacctaaaacccatgtatagaatcaagggagaatctgaagaagataccctctttatcaaacagatggtagaacaatgtgtgacatcccaggaattggtggaaaaagtgttgaagatactgtttagagatttgttcaagagtggagaatacaaagcgtacagatacgatgatgatgtagaaaatggatttattggattggatacactaaaattaaacattgttcatgatatagttgaaccatgtatgcctgttcgtaggccagtggctaagatactgtgtaaagaaatggtaaataaatactttgagaatccgctacatattattggtaaaaatcttcaagagtgcattgactttgttagtgaataggcatttcatctttctccaatactaattcaaattgttaaattaataatggatagtataaatagttattagttataagatagtaaaaataattattagaataagagtgtagtatcatagataactctcttctataaaaatggattttattcgtagaaagtatcttatatacacagtagaaaataatatagattttttaaaggatgatacattaagtaaagtaaacaattttaccctcaatcatgtactagctctcaagtatctagttagcaattttcctcaacacgttattactaaggatgtattagctaataccaatttttttgttttcatacatatggtacgatgttgtaaagtgtacgaagcggttttacgacacgcatttgatgcacccacgttgtacgttaaagcattgactaagaattatttatcgtttagtaacgcaatacaatcgtacaaggaaaccgtgcataaactaacacaagatgaaaaatttttagaggttgccgaatacatggacgaattaggagaacttataggcgtaaattatgacttagttcttaatccattatttcacggaggggaacccatcaaagatatggaaatcatttttttaaaactgtttaagaaaacagacttcaaagttgttaaaaaattaagtgttataagattacttatttgggcatacctaagcaagaaagatacaggcatagagtttgcggataatgatagacaaaatatatacactctatttcaacaaactggtagaatcgtccatagcaatctaacagaaacgtttagagattatatctttcccggagataagactagctattgggtgtggttaaacgaaagtatagctaatgatgcggatatcgttcttaatagacacgccattaccatgtatgataaaattcttagttatatatactctgagataaaacaaggacgcgttaataaaaacatgcttaagttagtttatatctttgagcctgaaaaagatatcagagaacttctgctagaaatcatatatgatattcctggagatatcctatctattattgatgcaaaaaacgacgattggaaaaaatattttattagtttttataaagctaattttattaacggtaatacatttattagtgatagaacgtttaacgaggacttattcagagttgttgttcaaatagatcccgaatatttcgataatgaacgaattatgtctttattctctacgagtgctgcggacattaaacgatttgatgagttagatattaataacagttatatatctaatataatttatgaggtgaacgatatcacattagatacaatggatgatatgaagaagtgtcaaatctttaacgaggatacgtcgtattatgttaaggaatacaatacatacctgtttttgcacgagtcggatcccatggtcatagagaacggaatactaaagaaactgtcatctataaaatccaagagtagacggctgaacttgtttagcaaaaacattttaaaatattatttagacggacaattggctcgtctaggtcttgtgttagatgattataaaggagacttgttagttaaaatgataaaccatcttaagtctgtggaggatgtatccgcattcgttcgattttctacagataaaaaccctagtattcttccatcgctaatcaaaactattttagctagttataatatttccatcatcgtcttatttcaaaggtttttgagagataatctatatcatgtagaagaattcttggataaaagcatccatctaaccaagacggataagaaatatatacttcaattgataagacacggtagatcatagaacagaccaaatatattattaataatttgtatatacatagatataattatcacacatttttgataaatgggaactgctgcaacaattcagactcccaccaaattaatgaataaagaaaatgcagaaatgattttggaaaaaattgttgatcatatagttatgtatattagtgacgaatcaagtgattcagaaaataatcctgaatatattgattttcgtaacagatacgaagactatagatctctcattataaaaagtgatcacgagtttgtaaagctatgtaaaaatcatgcggagaaaagttctccagaaacgcaacaaatgattatcaaacacatatacgaacaatatcttattccagtatctgaagtactattaaaacctataatgtccatgggtgacataattacatataacggatgtaaagacaatgaatggatgctagaacaactctctaccctaaactttaacaatctccgcacatggaactcatgtagcataggcaatgtaacgcgtctgttttatacattttttagttatctgatgaaagataaactaaatatataagtataatcccattctaatactttaacctgatgtattagcatcttattagaatattaacctaactaaaagacataacataaaaactcattacatagttgataaaaagcggtaggatataaatattatggctgccaccgttccgcgttttgacgacgtgtacaaaaatgcacaaagaagaattctagatcaagaaacattttttagtagaggtctaagtagaccgttaatgaaaaacacatatctatttgataattacgcgtatggatggataccagaaactgcaatttggagtagtagatacgcaaacctagatgctagtgactattatcccatttcgttgggattacttaaaaagttcgagtttctcatgtctctatataaaggtcctattcccgtatatgaagaaaaagtaaatactgaattcatagccaatggatcgttctctggtagatacgtatcatatcttcgaaagttttctgcccttccaacaaacgagtttattagttttttgttactgacttccattccaatctataatatcttgttctggtttaaaaacacacagtttgatattactaaacacacattattcagatacgtctatacagataatgccaaacacctggcgttggctaggtatatgcatcaaacaggagactataagcctttgtttagtcgtctcaaagagaattatatatttaccggtcccgttccaataagtatcaaagatatagatcaccctaatcttagtagagcaagaagtccatccgattatgagacattagctaatattagtactatattgtactttaccaagtatgatccggtattaatgtttttattgttttacgtacctgggtattcaattactacaaaaattactccagccgtagaatatctaatggataaactgaatctaacaaagagcgacgtacaactgttgtaaattattttatgcttcgtaaaatgtaggttttgaaccaaacattctttcaaagaatgagatgcataaaactttattatccaatagattgactatttcggacgtcaatcgtttaaagtaaacttcgtaaaatattctttgatcactgccgagtttaaaacttctatcgataattgtctcatatgttttaatatttacaagttttttggtccatggtacattagccggacaaatatatgcaaaataatatcgttctccaagttctatagtttctggattatttttattatattcagtaactaaatacatattagggttatctgcggatttataatttgagtgatgcattctactcaacataaataattctagaggagacgatctactatcaaattcggatcgtaaatctgtttctaaagaacggagaatatctatacatacctgattagaattcatccgtccttcagacaacatctcagacagtctggttttgtacatcttaatcatattcttatgaaacttggaaacatctcttctagtttcactagtacctttattaattctctcaggtacagattttgaattcgacgatgctgagtatttcatcgttgtatatttcttcttcgattgcataatcagattcttatataccgcctcaaactctattttaaaattattaaacaatactctattattaatcagtcgttctaactctttcgctatttctatagacttatctacatcttgactgtctatctctgtaaacacggagtcggtatctccatacacgctacgaaaacgaaatctgtaatctataggcaacgatgttttcacaatcggattaatatctctatcgtccatataaaatggattacttaatggattggcaaaccgtaacataccgttagataactctgctccatttagtaccgattctagatacaagatcattctacgtcctatggatgtgcaactcttagccgaagcgtatgagtatagagcactatttctaaatcccatcagaccatatactgagttggctactatcttgtacgtatattgcatggaatcatagatggccttttcagttgaactggtagcctgttttagcatctttttatatctggctctctctgccaaaaatgttcttaatagtctaggaatggttccttctatcgatctatcgaaaattgctatttcagagatgaggttcggtagtctaggttcacaatgaaccgtaatatatctaggaggtggatatttctgaagcaatagctgattatttatttcttcttccaatctattggtactaacaacgacaccgactaatgtttccggagatagatttccaaagatacacacattaggatacagactgttataatcaaagattaatacattattactaaacattttttgttttggagcaaataccttaccgccttcataaggaaacttttgttttgtttctgatctaactaagatagttttagtttccaacaatagctttaacagtggacccttgatgactgtactcgctctatattcgaataccatggattgaggaagcacatatgttgacgcacccgcgtctgtttttgtttctactccataatactcccacaaatactgacacaaacaagcatcatgaatacagtatctagccatatctaaagctatgtttagattataatccttatacatctgagctaaatcaacgtcatcctttccgaaagataatttatatgtatcattaggtaaagtaggacataatagtacgactttaaatccattttcccaaatatctttacgaattactttacatataatatcctcatcaacagtcacataattacctgtggttaaaacctttgcaaatgcagcggctttgcctttcgcgtctgtagtatcgtcaccgatgaacgtcatttctctaactcctctatttaatactttacccatgcaactgaacgcgttcttggatatagaatccaatttgtacgaatccaatttttcaaatttttgaatgaatgaatatagatcgaaaaatatagttccattattgttattaacgtgaaacgtagtattggccatgccgcctactcccttatgactagactgatttctctcataaatacagagatgtacagcttcctttttgtccggagatctaaagataattttctctcctgttaataactctagacgattagtaatatatctcagatcaaagttatgtccgttaaaggtaacgacgtagtcgaacgttagttccaacaattgtttagctattcgtaacaaaactatttcagaacatagaactagttctcgttcgtaatccatttccattagtgactgtatcctcaaacatcctctatcgacggcttcttgtatttcctgttccgttaacatctcttcattaatgagcgtaaacaataatcgtttaccacttaaatcgatataacagtaacttgtatgcgagattgggttaataaatacagaaggaaacttcttatcgaagtgacactctatatctagaaataagtacgatcttgggatatcgaatctaggtatttttttagcgaaacagttacgtggatcgtcacaatgataacatccattgttaatctttgtcaaatattgctcgtccaacgagtaacatccgtctggagatatcccgttagaaatataaaaccaactaatattgagaaattcatccatggtggcattttgtatgctgcgtttctttggctcttctatcaaccacatatctgcgacggagcattttctatctttaatatctagattataacttattgtctcgtcaatgtctatagttctcatctttcccaacggcctcgcattaaatggaggaggagacaatgactgatatatttcgtccgtcactacgtaataaaagtaatgaggaaatcgtataaatacggtctcgccatttcgacatctggatttcagatataaaaatctgttttcaccgtgactttcaaaccaattaatgcaccgaacatccatttatagaatttagaaatatattttcatttaaatgaatcccaaacattggggaagagccgtatggaccattatttttatagtactttcgcaagcgggtttagacggcaacatagaagcgtgtaaacgaaaactatatactatagttagcactcttccatgtcctgcatgtagacggcacgcgactatcgctatagaggacaataatgtcatgtctagcgatgatctgaattatatttattattttttcatcagattatttaacaatttggcatctgatcccaaatacgcgatcgatgtgacaaaggttaaccctttataaacttaacccattataaaacttatgattagtcacaactgaaataaccgcgtgattattttttggtataattctacacggcatggtttctgtgactatgaattcaacccccgttacattagtgaaatctttaacaaacagcaagggttcgtcaaagacataaaactcattgtttacaatcgaaatagaccccctatcacacttaaaataaaaaatatccttatcctttaccaccaaataaaattctgattggtcaatgtgaatgtattcacttaacagttccacaaatttatttattaactccgaggcacatacatcgtcggtattttttatggcaaactttactcttccagcatccgtttctaaaaaaatattaacgagttccatttatatcatccaatattattgaaatgacgttgatggacagatgatacaaataagaaggtacggtacctttgtccaccatctcctccaattcatgctctattttgtcattaactttaatgtatgaaaacagtacgccacatgcttccatgacagtgtgtaacactttggatacaaaatgtttgacattagtataattgtccaagactgtcaatctataatagatagtagctataatatattctatgatggtattgaagaagatgacaaccttggcatattgatcatttaacacagacatggtatcaacagatagcttgaatgaaagagaatcagtaattggaataagcgtcttctcgatagagtgtccgtataccaacatgtctgatattttgatgtattccattaaattatttagttttttctttttattctcgttaaacagcatttctgtcaacggaccccaacatcgttgaccgattaagttttgattgatttttccgtgtaaggcgtatctagtcagatcgtatagcctatccaataatccatcgtctgtgtgtagatcacatcgtacactttttaattctctatagaagagcgacagacatctggagcaattacagacagcaatttctttattctctacagatgtaagatacttgaagacattcctatgatgatgcagaattttggataacacggtattgatggtatctgttaccataattcctttgatggctgatagtgtcagagcacaagatttccaatctttgacaatttttagcaccattatctttgttttgatatctatatcagacagcatggtgcgtctgacaacacagggattaagacggaaagatgaaatgattctctcaacatcttcaatagataccttgctattttttctggcattatctatatgtgcgagaatatcctctagagaatcagtatcctttttgatgatagtggatctcaatgacatgggacgtttaaaccttcttattctatcaccagattgcatggtgatttgtcttctttcttttatcataatgtaatctctaaattcatcggcaaattgtctatatctaaaatcataatatgagatgtttacctctacaaatatctgttcgtccaatgttagagtatttacatcagttttgtattccaaattaaacatggcaacggatttaattttatattcctctattaagtcctcgtcgataataacagaatgtagataatcatttaatccgtcgtacatggttggaagatgcttgttgacaaaatctttaattgtcttgatgaaggtgggactatatctaacatcttgattaataaaatttataacattgtccataggatactttgtaactagttttatacacatctcttcatcggtaagtttagacagaatatcgtgaacaggtggtatattatattcatcagatatacgaagaacaatgtccaaatctatattgtttaatatattatatagatgtagcgtagctcctacaggaatatctttaactaagtcaatgatttcatcaaccgttagatctattttaaagttaatcatataggcattgatttttaaaaggtatgtagccttgactacattctcattaattaaccattccaagtcattgtgtgtaagaagattatattctatcataagcttgactacatttggtcccgataccattaaagaattcttatgatataaggaaacagattttaggtactcatctactctacaagaattttggagagccttaacgatatcagtgacgtttattatttcaggaggaaagaatctaacattgagaatatcggaattaatagcttccagatacagtgattttggcaatagtccgtgtaatccataatccagtaacacgagctggtgcttgctagacaccttttcaatgtttaatttttttgaaataagctttgataaagccttcctcgcaaattccggatacatgaacatgtcggcgacatgattaagtattgttttttcattatttttatattttctcaacaagttctcaataccccaatagatgatagaatatcacccaatgcgtccatgttgtctatttccaacaggtcgctatatccaccaatagaagtttttccaaaaaagattctaggaacagttctaccaccagtaatttgttcaaaataatcccgcaattcattttcgggtttaaattctttaatatcgacaatttcatacgctcctcttttgaaactaaacttatttagaatatccagtgcatttctacaaaaaggacatgtatacttgacaaaaattgtcactttgttattggccaacctttgttgtacaaattcctcggccattttaatatttaagtgatataaaactatctcgacttatttaactctttagtcgagatatatggacgcagatagctatatgatagccaactacagaaggcaaacgctataaaaaacataattacgacgagcatatttataaatatttttattcagcattacttgatatagtaatattaggcacagtcaaacattcaaccactctcgatacattaactctctcattttctttaacaaattctgcaatatcttcgtaaaaagattcttgaaactttttagaatatctatcgactctagatgaaatagcgttcgtcaacatactatgttttgtatacataaaggcgcccattttaacagtttctagtgacaaaatgctagcgatcctaggatcctttagaatcacatagattgacgattcgtctctcttagtaactctagtaaaataatcatacaatctagtacgcgaaataatattatccttgacttgaggagatctaaacaatctagttttgagaacatcgataagttcatcgggaatgacatacatactatctttaatagaactcttttcatccagttgaatggattcgtccttaaccaactgattaatgagatcttctattttatcattttccagatgatatgtatgtccattaaagttaaattgtgtagcgcttctttttagtctagcagccaatactttaacatcactaatatcgatatacaaaggagatgatttatctatggcattaagaattcgtttttcgacatccgtcaaaaccaattcctttttgcctgtatcatccagttttccatcctttgtaaagaaattattttctactagactattaataagactgataaggattcctccataattgcacaatccaaactttttaacaaaactagactttacgagatctacaggaatgcgtacttcaggttttttagcttgtgattttttcttttgcggacattttctagtaaccaactcatctaccatttcattgattttagcagtgaaataagctttcaatgcacgggcactgatactattgaaaacgagttgatcttcaaattccgccatttaagttcaccaaacaacttttaaatacaaatatatcaatagtagtagaataagaactataaaaaaaataataattaaccaaccccaacaaccggtattattagttgatgtggtagttttctcatcacttagaacagatttaacaatttctataaagtctgtcaaatcatcttccggagaccccataaatacaccaaatatagcggcgtacaacttatccatttatacattgaatattggcttttctttatcgctatcttcatcatattcatcatcaatatcaacaagtcccagattacgagccagatcttcttctacattttcagtcattgatacacgttcactatctccagagagtccgataacgttagccaccacttctctatcaatgattagtttcttgagcgcgaaagtaatttttgtttccgttccggatctatagaagacgataggtgtgataattgccttggccaattgtctttctcttttactgagtgattctagttcaccttctatagatctgagaatggatgattctccagtcgaaacatattctaccatggatccgtttaatttgttgatgaagatggattcatccttaaatgttttctctgtaatagtttccaccgaaagactatgcaaagaatttggaatgcgttccttgtgcttaatgtttccatagacggcttctagaagttgatacaacataggactagccgcggtaacttttatttttagaaagtatccatcgcttctatcttgtttagatttatttttataaagtttagtctctccttccaacataataaaagtggaagtcatttgactagataaactatcagtaagttttatagagatagacgaacaattagcgtattgagaagcatttagtgtaacgtattcgatacattttgcattagatttactaatcgattttgcatactctataacacccgcacaagtctgtagagaatcgctagatgcagtaggtcttggtgaagtttcaactctcttcttgattaccttactcatgattaaacctaaataattgtactttgtaatataatgatatatattttcactttatctcatttgagaataaaaatgtttttgtttaaccactgcatgatgtacagatttcggaatcgcaaaccaccagtggttttattttatccttgtccaatgtgaattgaatgggagcggatgcgggtttcgtacgtagatagtacattcccgtttttagaccgagactccatccgtaaaaatgcatactcgttagtttggaataactcggatctgctatatggatattcatagattgactttgatcgatgaaggctcccctgtctgcagccatttttatgatcgtcttttgtggaatttcccaaatagttttataaactcgcttaatatcttctggaaggtttgtattctgaatggatccaccatctgccataatcctattcttgatctcatcattccataattttctctcggttaaaactctaaggagatgcggattaactacttgaaattctccagacaatactctccgagtgtaaatattactggtatacggttccaccgactcattatttcccaaaatttgagcagttgatgcagtcggcataggtgccaccaataaactatttctaagaccgtatgttctgattttatcttttagaggttcccaattccaaagatccgacggtacaacattccaaagatcatattgtagaataccgttactggcgtacgatcctacatatgtatcgtatggtccttccttctcagctagttcacaactcgcctctaatgcaccgtaataaatggtttcgaagatcttcttatttagatcttgtgcttccaggctatcaaatggataatttaagagaataaacgcgtccgctaatccttgaacaccaataccgataggtctatgtctcttattagagatttcagcttctggaataggataataattaatatctataattttattgagatttctgacaattactttgaccacatccttcagtttgagaaaatcaaatcgcccatctattacaaacatgttcaaggcaacagatgccagattacaaacggctacctcattagcatccgcatattgtattatctcagtgcaaagattactacacttgatagttcctaaattttgttgattactctttttgttacacgcatccttataaagaatgaatggagtaccagtttcaatctgagattctataatcgctttccagacgactcgagcctttattatagatttgtatctcctttctctttcgtatagtgtatacaatcgttcgaactcgtctccccaaacattgtccaatccaggacattcatccggacacatcaacgaccactctccgtcatccttcactcgtttcataaagagatcaggaatccaaagagctataaatagatctctggttctatgttcctcgtttcctgtattctttttaagatcgaggaacgccataatatcagaatgccacggttccaagtatatggccataactccaggccgtttgtttcctccctgatctatgtatctagcggtgttattataaactctcaacattggaataataccgtttgatataccattggtaccggagatatagcttccactggcacgaatattactaattgatagacctattccccctgccattttagagattaatgcgcatcgttttaacgtgtcatagataccctctatgctatcatcgatcatgttaagtagaaaacagctagacatttggtgacgactagttcccgcattaaataaggtaggagaagcgtgcgtaaaccatttttcagaaagtagattgtacgtctcaatagctgagtctatatcccattgatgaattcctactgcgacacgcattaacatgtgctgaggtctttcaacgatcttgttgtttattttcaacaagtaggatttttccaaagttttaaaaccaaaatagttgtatgaaaagtctcgttcgtaaataataaccgagttgagtttatccttatatttgttaactatatccatggtgatacttgaaataatcggagaatgtttcccatttttaggattaacatagttgaataaatcctccatcacttcactaaatagtttttttgtttccttgtgtagatttgatacggctattctggcggctagaatggcataatccggatgttgtgtagtacaagtggctgctatttcggctgccagagtgtccaattctaccgttgttactccattatatattccttgaataaccttcatagctattttaataggatctatatgatccgtgtttaagccataacataattttctaatacgagacgtgattttatcaaacatgacattttccttgtatccatttcgtttaatgacaaacatttttgttggtgtaataaaaaaattatttaacttttcattaatagggatttgacgtatgtagcgtacaaaatgattgttcctggtatatagataaagagtcctatatatttgaaaatcgttacggctcgattaaactttaatgattgcatagtgaatatatcattaggatttaactccttgactatcatggcggcgccagaaattaccatcaaaagcattaatacagttataccgatcgcagttagaacggttatagcatccaccatttatatctaaaaattagatcaaagaatatgtgacaaagtcctagttgtatactgagaattgacgaaacaatgtttcttacatatttttttcttattagtaaccgacttaatagtaggaactggaaaactagacttgattattctataagtatagatacccttccaaataatattctctttgataaaagttccagaaaatgtagaattttttaaaaagttatcttttgctattaccaagattgtgtttagacgcttattattaatatgagtgatgaaatccacaccgcctctagatatcgcctttatttccacattagatggtaaatccaatagtgaaactatctttttaggaatgtatggactcgcgtttagaggagtaaacgtcttaggcgtcggaaaggatgattcatcaaacgaataaacaatttcacaaatggatgttaatgtattagtaggaaattttttgacgctattggaattgaagattctaatggatgatgttctacctatttcatccgataacatgttaatttccgacaccaacggttttaatatttcgatgatatacggtagtctctctttcggacttatatagcttattccacaatacgagtcattatatactccaaaaaacaaaataactagtataaaatctgtatcgaatgggaaaaacgaaattatcgacataggtatagaatccggaacattgaacgtattaatacttaattctttttctgtggtaagtaccgataggttattgacattgtatggttttaaatattctataacttgagacttgatagatattagtgatgaattgaaaattatttttatcaccacgtgtgtttcaggatcatcgtcgacgcccgtcaaccaaccgaacggagtaaaataaatatcattaatatatgctctagatattagtatttttatcaatcctttgattatcatcttctcgtaggcgaatgattccatgatcaagagtgatttaagaacatcctccggagtattaatgggcttagtaaacagtccatcgttgcaataataaaagttatccaagttaaaggatattatgcattcgtttaaagatatcacctcatctgacggagacaattttttggtaggttttagagactttgaagctacttgtttaacaaagttattcatcgtcgtctactattctatttaattttgtagttaatttatcacatatcacattaattgactttttggtccacttttccatacgtttatattcttttaatcctgcgttatccgtttccgttatatccagggatagatcttgcaagttaaatagaatgctcttaaataatgtcattttcttatccgctaaaaatttaaagaatgtataaacctttttcagagatttgaaactcttaggtggtgtcctagtacacaatatcataaacaaactaataaacattccacattcagattccaacagctgattaacttccacattaatacagcctattttcgctccaaatgtacattcgaaaaatctgaataaaacatcgatgtcacaatttgtattatccaatacagaatgtttgtgattcgtgttaaaaccatcggagaaggaatagaaataaaaattattatagtggtggaattcagttggaatattgcctccggagtcataaaaggatactaaacattgttttttatcataaattacacatttccaatgagacaaataacaaaatccaaacattacaaatctagaggtagaacttttaattttgtctttaagtatatacgataagatatgtttattcataaacgcgtcaaatttttcatgaatcgctaaggagtttaagaatctcatgtcaaattgtcctatataatccacttcggatccataagcaaactgagagactaagttcttaatacttcgattgctcatccaggctcctctctcaggctctattttcatcttgacgacctttggattttcaccagtatgtattcctttacgtgataaatcatcgattttcaaatccatttgtgagaagtctatcgccttagatactttttcccgtagtcgaggtttaaaaaaatacgctaacggtatactagtaggtaactcaaagacatcatatatagaatggtaacgcgtctttaactcgtcggttaactctttcttttgatcgagttcgtcgctactattgggtctgctcaggtgccccgactctactagttccaacatcataccgataggaatacaagacactttgccggcggttgtagatttatcatatttttccactacatatccgttacaatttgttaaaaatttagatacatctatattgctacataatccagctagtgaatatatatgacataataaattggtaaatcctagttctggtattttactaattactaaatctgtatatctttccatttatcatggaaaagaatttaccagatatcttcttttttccaaactgcgttaatgtattctcttacaaatattcacaagatgaattcagtaatatgagtaaaacggaacgtgatagtttctcattggccgtgtttccagttataaaacatagatggcataacgcacacgttgtaaaacataaaggaatatacaaagttagtacagaagcacgtggaaaaaaagtatctcctccatcactaggaaaacccgcacacataaacctaaccgcgaagcaatatatatacagtgaacacacaataagctttgaatgttatagttttctaaaatgtataacaaatacagaaatcaattcgttcgatgagtatatattaagaggactattagaagctggtaatagtttacagatattttccaattccgtaggtaaacgaacagatactataggtgtactagggaataagtatccatttagcaaaattccattggcctcattaactcctaaagcacaacgagagatattttcagcgtggatttctcatagacctgtagttttaactggaggaactggagtgggtaagacgtcacaggtacccaagttattgctttggtttaattatttatttggtggattctctactctagataaaatcactgactttcacgaaagaccagtcattctatctcttcctaggatagctttagttagattgcatagcaataccattttaaaatcattgggatttaaggtactagatggatctcctatttctttacggtacggatctataccggaagaattaataaacaaacaaccaaaaaaatatggaattgtattttctacccataagttatctctaacaaaactatttagttatggcactcttattatagacgaagttcatgagcatgatcaaataggagatattattatagcagtagcgagaaagcatcatacgaaaatagattctatgtttttaatgactgccacgttagaggatgacagggaacggctaaaagtatttttacctaatcccgcatttatacatattcctggagatacactgtttaaaattagcgaggtatttattcataataagataaatccatcttccagaatggcatacatagaagaagaaaagagaaatttagttactgctatacagatgtatactcctcctgatggatcatccggtatagtctttgtggcatccgttgcacagtgtcacgaatataaatcatatttagaaaaaagattaccgtatgatatgtatattattcatggtaaggtcttagatatagacgaaatattagaaaaagtgtattcatcacctaatgtatcgataattatttctactccttatttggaatccagcgttactatacgcaatgttacacacatttatgatatgggtagagtttttgtccccgctccttttggaggatcgcaacaatttatttctaaatctatgagagatcaacgaaaaggaagagtaggaagagttaatcctggtacatacgtctatttctatgatctgtcttatatgaagtctatacagcgaatagattcagaatttctacataattatatattgtacgctaataagtttaatctaacactccccgaagatttgtttataatccctacaaatttggatattctatggcgtacaaaggaatatatagactcgttcgatattagtacagaaacatggaataaattattatccaattattatatgaagatgatagagtatgctaaactttatgtactaagtcctattctcgctgaggagttggataactttgagaggacgggagaattaactagtattgtacgagaagccattttatctctaaatttacaaattaagattttaaattttaaacataaagatgatgatacgtatatacacttttgtaaaatattattcggtgtctataacggaacaaacgctactatatattatcatagacctctaacgggatatatgaatatgatttcagatactatatttgttcctgtagataataactaaaaatcaaactctaatgaccacatctttttttagagatgaaaaattttccacatctccttttgtagacacgactaaacattttgcagaaaaaagtttattagtgtttagataatcgtatacttcatcagtgtagatagtaaatgtgaacagataaaaggtattcttgctcaatagattggtaaattccatagaatatattaatcctttcttcttgagatcccacatcatttcaaccagagacgttttatccaatgatttacctcgtactataccacatacaaaactagattttgcagtgacgtcgtacctggtattcctaccaaacaaaattttacttttagttcttttagaaaattctaaggtagaatctctatttgccaatatgtcatctatggaattaccactagcaaaaaatgatagaaatatatattgatacatcgcagctggttttgatctactatactttaaaaacgaatcagattccataattgcctgtatatcatcagctgaaaaactatgttttacacgtattccttcggcatttctttttaatgatatatcttgtttagacaatgataaagttatcatgtccatgagagacgcgtctccgtatcgtataaatatttcattagatgttagacgcttcattaggggtatacttctataaggtttcttaatcagtccatcattggttgcgtcaagaactactatcggatgttgttgggtatctctagtgttacacatggccttactaaagtttgggtaaataactatgatatctctattaattatagatgcatatatttcattcgtcaaggatattagtatcgacttgctatcgtcattaatacgtgtaatgtaatcatataaatcatgcgatagccaaggaaaatttaaatagatgttcatcatataatcgtcgctataattcatattaatacgttgacattgactaatttgtaatatagcctcgccacgaagaaagctctcgtattcagtttcatcgataaaggataccgttaaatataactggttgccgatagtctcatagtctattaagtggtaagtttcgtacaaatacagaatccctaaaatattatctaatgttggattaatctttaccataactgtataaaatggagacggagtcataactattttaccgtttgtacttactggaatagatgaaggaataatctccggacatgctggtaaagacccaaatgtctgtttgaagaaatccaatgttccaggtcctaatctcttaacaaaaattacgatattcgatcccgatatcctttgcattctatttaccagcatatcacgaactatattaagattatctatcatgtctattctcccaccgttatataaatcgcctccgctaagaaacgttagtatatccatacaatggaatacttcatttctaaaatagtattcgttttctaattctttaatgtgaaatcgtatactagaaagggaaaaattatctttgagttttccgttagaaaagaaccacgaaactaatgttctgattgcgtccgattccgttgctgaattaatggatttacaccaaaaactcatataacttctagatgtagaagcattcgctaaaaaattagtagaatcaaaggatataagtagatgttccaacaagtgagcaattcccaagatttcatctatatcattctcgaatccgaaattagaaattcccaagtagatatcctttttcatccgatcgttgatgaaaatacgaactttattcggtaagacaatcatttactaaggagtaaaataggaagtaatgttcgtatgtcgttatcatcgtataaattaaaggtgtgttttttaccattaagtgacattataattttaccaatattggaattataatataggtgtatttgcgcactcgcgacggttgatgcatcggtaaatatagctgtatctaatgttctagtcggtatttcatcatttcgctgtctaataatagcgttttctctatctgtttccattacagctgcctgaagtttattggtcggataatatgtaaaataataagaaatacatacgaataacaaaaataaaataagatataataaagatgccatttagagatctaattttgtttaacttgtccaaattcctacttacagaagatgaggaatcgttggagatagtgtcttccttatgtagaggatttgaaatatcttataatgacttgataacttactttccagataggaaataccataaatatatttataaagtatttgaacatgtagatttatcggaggaattaagtatggaattccatgatacaactctgagagatttagtctatcttagattgtacaagtattccaagtgtatacggccgtgttataaattaggagataatctaaaaggcatagttgttataaaggacaggaatatttatattagggaagcaaatgatgacttgatagaatatctcctcaaggaatacactcctcagatttatacatattctaatgagcgcgtccccataactggttcaaaattaattctttgtggattttctcaagttacatttatggcgtatacaacgtcgcatataacaacaaataaaaaggtagatgttctcgtttccaaaaaatgtatagatgaactagtcgatccaataaattatcaaatacttcaaaatttatttgataaaggaagcggaacaataaacaaaatactcaggaagatattttattcggtaacaggtggccaaactccataggtagctttttctatttcggattttagaatttccaaattcaccagcgatttatcggttttggtgaaatccaaggatttattaatgtccacaaatgccatttgttttgtctgtggattgtatttgaaaatggaaacgatgtagttagatagatgcgctgcgaagtttcctattagggttccgcgcttcacgtcacccagcatacttgaatcaccatcctttaaaaaaaatgataagatatcaacatggagtatatcatactcgaattttaattcttctactgactcactgacattttcacaaatactacaatacggtttaccgaaaataatcagtacgttcttcatttatgggtatcaaaaacttaaaatcgttactgctggaaaataaatcactgacgatattagatgataatttatacaaagtatacaatggaatatttgtggatacaatgagtatttatatagccgtcgccaattgtgtcagaaacttagaagagttaactacggtattcataaaatacgtaaacggatgggtaaaaaagggagggcatgtaaccctttttatcgatagaggaagtataaaaattaaacaagacgttagagacaagagacgtaaatattctaaattaaccaaggacagaaaaatgttagaattagaaaagtgtacatccgaaatacaaaatgttaccggatttatggaagaagaaataaaggcagaaatgcaattaaaaatcgataaactcacatttcaaatatatttatctgattctgataacataaaaatatcattgaatgagatactaacacatttcaacaataatgagaatgttacattattttattgtgatgaacgagacgcagaattcgttatgtgtctcgaggctaaaacacatttctctaccacaggagaatggccgttgataataagtaccgatcaggatactatgctatttgcatctgctgataatcatcctaagatgataaaaaacttaactcaactgtttaaatttgttccctcggcagaggataactatttagcaaaattaacggcgttagtgaatggatgtgatttctttcctggactctatggggcatctataacacccaccaacttaaacaaaatacaattgtttagtgattttacaatcgataatatagtcactagtttggcaattaaaaattattatagaaagactaactctaccgtagacgtgcgtaatattgttacgtttataaacgattacgctaatttagacgatgtctactcgtatattcctccttgtcaatgcactgttcaagaatttatattttccgcattagatgaaaaatggaatgaatttaaatcatcttatttagaaagcgtgccgttaccctgccaattaatgtacgcgttagaaccacgcaaggagattgatgtttcagaagttaaaactttatcatcttatatagatttcgaaaatactaaatcagatatcgatgttataaaatctatatcctcgatcttcggatattctaacgaaaactgtaacacgatagtattcggcatctataaggataatttactactgagtataaataattcattttactttaacgatagtctgttaataaccaatactaaaagtgataatataataaatataggttactagattaaaaatggtgttccaactcgtgtgctctacatgcggtaaagatatttctcacgaacgatataaattgattatacgaaaaaaatcattaaaggatgtactcgtcagtgtaaagaacgaatgttgtaggttaaaattatctacacaaatagaacctcaacgtaacttaacagtgcaacctctattggatataaactaatatggatccggttaattttatcaagacatatgcgcctagaggttctattatttttattaattataccatgtcattaacaagtcatttgaatccatcgatagaaaaacatgtgggtatttattatggtacgttattatcggaacacttggtagttgaatctacctatagaaaaggagttcgaatagtcccattggatagtttttttgaaggatatcttagtgcaaaagtatacatgttagagaatattcaagttatgaaaatagcagctgatacgtcattaactttattgggtattccgtatggatttggtcatgatagaatgtattgttttaaattggtagctgactgttataaaaatgccggtattgatacatcgtctaaacgaatattgggcaaagatatttttctgagccaaaacttcacagacgataatagatggataaagatatatgattctaataatttaacattttggcaaattgattaccttaaagggtgagttaatatgcataactactcctccgttgttttttccctcgttctttttcttaacgttgtttgccatcactctcataatgtaaagatattctaaaatggtaaacttttgcatatcggacgcagaaattggtataaatgttgtaattgtattatttcccgtcaatggactagtcacagctccatcagttttatatcctttagagtatttctcactcgtgtctaacattctagagcattccatgatctgtttatcgttgatattggccggaaagatagattttttattttttattatattactattggcaattgtagatataacttctggtaaatatttttctaccttttcaatctcttctattttcaagccggctatatattctgctatattgttgctagtatcaataccttttctggctaagaagtcatatgtggtattcactatatcagttttaactggtagttccattagcctttccacttctgcagaataatcagaaattggttctttaccagaaaatccagctactataataggctcaccgatgatcattggcaaaatcctatattgtaccagattaatgagagcatatttcatttccaataattctgctagttcttgagacattgatttatttgatgaatctagttggttctctagatactctaccatttctgccgcatacaataacttgttagataaaatcagggttatcaaagtgtttagcgtggctagaatagtgggcttgcatgtattaaagaatgcggtagtatgagtaaaccgttttaacgaattatatagtctccagaaatctgtggcgttacatacatgagccgaatgacatcgaagattgtccaatatttttaatagctgctctttgtccattatttctatatttgactcgcaacaattgtagataccattaatcaccgattcctttttcgatgccggacaatagcacaattgtttagctttggactctatgtattcagaattaatagatatatctctcaatacagattgcactatacattttgaaactatgtcaaaaattgtagaacgacgctgttctgcagccatttaactttaaataatttacaaaaatttaaaatgagcatccgtataaaaatcgataaactgcgccaaattgtggcatatttttcagagttcagtgaagaagtgtctataaatgtagactcgacggatgagttaatgtatatttttgccgccttgggcggatctgtaaacatttgggcaattatacctctaagtgcatcagtgttttaccgaggagccgaaaatattgtgtttaatcttcctgtgtccaaggtaaaatcgtgtttgtgtagttttcacaatgatgccatcatagatatagaacctgatctggaaaataatctagtaaaactttctagttatcatgtagtaagtgtcgattgtaacaaggaactgatgcctattaggacagatactactatttgtctaagtatagatcaaaagaaatcttacgtgtttaattttcacaagtatgaagaaaaatgttgtggtagaaccgtcattcatctagaatggttgttgggctttatcaagtgtattagtcagcatcagcatctggctattatgtttaaagatgacaatattattatgaagactcctggtaatactgatgcgttttccagggaatattctatgactgaatgttctcaagaactacaaaagttttctttcaaaatagctatctcgtctctcaacaaactacgaggattcaaaaagagagtcaatgtttttgaaactagaatcgtaatggataatgacgataacattttaggaatgttgttttcggatagagttcaatcctttaagatcaacatctttatggcgtttttagattaatactttcaatgagataaatatgggtggcggagtaagtgttgagctccctaaacgggatccgcctccgggagtacccactgatgagatgttattaaacgtggataaaatgcatgacgtgatagctcccgctaagcttttagaatatgtgcatataggaccactagcaaaagataaagaggataaagtaaagaaaagatatccagagtttagattagtcaacacaggacccggtggtctttcggcattgttaagacaatcgtataatggaaccgcacccaattgctgtcgcacttttaatcgtactcattattggaagaaggatggaaagatatcagataagtatgaagagggtgcagtattagaatcgtgttggccagacgttcacgacactggaaaatgcgatgttgatttattcgactggtgtcagggggatacgttcgatagaaacatatgccatcagtggatcggttcagcctttaataggagtaatagaactgtagagggtcaacaatcgttaataaatctgtataataagatgcaaacattatgtagtaaagatgctagtgtaccaatatgcgaatcatttttgcattatttacgcgcacacaatacagaagatagcaaagagatgatcgattatattctaagacaacagtctgcggactttaaacagaaatatatgagatgtagttatcccactagagataagttagaagagtcattaaaatatgcggaacctcgagaatgttgggatccagagtgttcgaatgccaatgttaatttcttactaacacgtaattataataatttaggactttgcaatattgtacgatgtaataccagcgtgaacaacttacagatggataaaacttcctcattaagattgtcatgtggattaagcaatagtgatagattttctactgttcccgtcaatagagcaaaagtagttcaacataatattaaacactcgttcgacctaaaattgcatttgatcagtttattatctctcttggtaatatggatactaattgtagctatttaaatgggtgccgcggcaagcatacagacgacggtgaatacactcagcgaacgtatctcgtctaaattagaacaagaagcgaacgctagtgctcaaacaaaatgtgatatagaaatcggaaatttttatatccgacaaaaccatggatgtaacctcactgttaaaaatatgtgctctgcggacgcggatgctcagttggatgctgtgttatcagccgctacagaaacatatagtggattaacaccggaacaaaaagcatacgtgccagctatgtttactgctgcgttaaacattcagacgagtgtaaacactgttgttagagattttgaaaattatgtgaaacagacttgtaattctagcgcggtcgtcgataacaaattaaagatacaaaacgtaatcatagatgaatgttacggagccccaggatctccaacaaatttggaatttattaatacaggatctagcaaaggaaattgtgccattaaagcgttgatgcaattgacgactaaggccactactcaaatagcacctagacaagttgctggtacaggagttcagttttatatgattgttatcggtgttataatattggcagcgttgtttatgtactatgccaagcgtatgttgttcacatccaccaatgataaaatcaaacttattttagccaataaggaaaacgtccattggactacttacatggacacattctttagaacttctccgatggttattgctaccacggatatgcaaaactgaaaatatattgataatattttaatagattaacatggaagttatcgctgatcgtctagacgatatagtgaaacaaaatatagcggatgaaaaatttgtagattttgttatacacggtctagagcatcaatgtcctgctatacttcgaccattaattaggttgtttattgatatactattatttgttatagtaatttatatttttacggtacgtctagtaagtagaaattatcaaatgttgttggtggtgctagtcatcacattaactattttttattactttatactataatagtactagactgacttctaacaaacatctcacctgccataaataaatgcttgatattaaagtcttctatttctaacactattccatctgtggaaaataatactctgacattatcgctaattgacacatcggtgagtgatatgcctataaagtaataatcttctttgggcacatataccagtgtaccaggttctaacaacctatttactggtgctcctgtagcatactttttctttaccttgagaatatccatcgtttgcttggtcaatagcgatatgtgattttttatcaaccactcaaaaaagtaattggagtgttcatatcctctacgggctattgtctcatggccgtgtatgaaatttaagtaacacgactgtggtagatttgttctatagagccgattgccgcaaatagatagaactaccaatatgtctgtacaaatgttaaacattaattgattaacagaaaaaacaatgttcgttctgggaatagaaaccagatcaaaacaaaattcgttagaatatatgccacgtttatacatggaatataaaataactacagtttgaaaaataacagtatcatttaaacatttaacttgcggggttaatctcacaactttactgtttttgaactgttcaaaatatagcatcgatccgtgagaaatacgtttagccgcctttaatagaggaaatcccaccgcctttctggatctcaccaacgacgatagttctgaccagcaactcatttcttcatcatccacctgttttaacatataataggcaggagatagatatccgtcattgcaatattccttctcgtaggcacacaatctaatattgataaaatctccattctcttctctgcatttattatcttgtctcggtggctgattaggctgtggtcttggtttaggccttggtctatcgttgttgaatctattttggtcattaaatctttcatttcttcctggtatatttctatcacctcgtttggttggatttttgtctatattatcgtttgtaacatcggtacgggtattcatttatcacaaaaaaaacttctctaaatgagtctactgctagaaaacctcatcgaagaagataccatattttttgcaggaagtatatctgagtatgatgatttacaaatggttattgccggcgcaaaatccaaatttccaagatctatgctttctatttttaatatagtacctagaacgatgtcaaaatatgagttggagttgattcataacgaaaatatcacaggagcaatgtttaccacaatgtataatataagaaacaatttgggtctaggagatgataaactaactattgaagccattgaaaactatttcttggatcctaacaatgaagttatgcctcttattattaataatacggatatgactgccgtcattcctaaaaaaagtggtaggagaaagaataagaacatggttatcttccgtcaaggatcatcacctatcttgtgcattttcgaaactcgtaaaaagattaatatttataaagaaaatatggaatccgcgtcgactgagtatacacctatcggagacaacaaggctttgatatctaaatatgcgggaattaatgtcctgaatgtgtattctccttccacatccataagattgaatgccatttacggattcaccaataaaaataaactagagaaacttagtactaataaggaactagaatcgtatagttctagccctcttcaagaacccattaggttaaatgattttctgggactattggaatgtgttaaaaagaatattcctctaacagatattccgacaaaggattgattactataaatggagaatgttcctaatgtatactttaatcctgtgtttatagagcccacgtttaaacattctttattaagtgtttataaacacagattaatagttttatttgaagtattcgttgtattcattctaatatatgtattttttagatctgaattaaatatgttcttcatgcctaaacgaaaaatacccgatcctattgatagattacgacgtgctaatctagcgtgtgaagacgataaattaatgatctatggattaccatggatgacaactcaaacatctgcgttatcaataaatagtaaaccgatagtgtataaagattgtgcaaagcttttgcgatcaataaatggatcacaaccagtatctcttaacgatgttcttcgcagatgatgattcattttttaagtatttggctagtcaagatgatgaatcttcattatctgatatattgcaaatcactcaatatctagactttctgttattattattgatccaatcaaaaaataaattagaagctgtgggtcattgttatgaatctctttcagaggaatacagacaattgacaaaattcacagactttcaagattttaaaaaactgtttaacaaggtccctattgttacagatggaagggtcaaacttaataaaggatatttgttcgactttgtgattagtttgatgcgattcaaaaaagaatcctctctagctaccaccgcaatagatcctgttagatacatagatcctcgtcgtgatatcgcattttctaacgtgatggatatattaaagtcgaataaagtgaacaataattaattctttattgtcatcatgaacggcggacatattcagttgataatcggccccatgttttcaggtaaaagtacagaattaattagacgagttagacgttatcaaatagctcaatataaatgcgtgactataaaatattctaacgataatagatacggaacgggactatggacgcatgataagaataattttgaagcattggaagcaactaaactatgtgatgtcttggaatcaattacagatttctccgtgataggtatcgatgaaggacagttctttccagacattgtttaattctgtgagcgtatggcaaacgaaggaaaaatagttatagtagccgcactcgatgggacatttcaacgtaaaccgtttaataatattttgaatcttattccattatctgaaatggtggtaaaactaactgctgtgtgtatgaaatgctttaaggaggcttccttttctaaacgattgggtgaggaaaccgagatagagataataggaggtaatgatatgtatcaatcggtgtgtagaaagtgttacgtcggctcataatattatattttttatctaaaaaactaaaaataaacattgattaaattttaatataatacttaaaaatggatgttgtgtcgttagataaaccgtttatgtattttgaggaaattgataatgagttagattacgaaccagaaagtgcaaatgaggtcgcaaaaaaactgccgtatcaaggacagttaaaactattactaggagaattattttttcttagtaagttacagcgacacggtatattagatggtgccaccgtagtgtatataggatcggctcctggtacacatatacgttatttgagagatcatttctataatttaggagtgatcatcaaatggatgctaattgacggccgccatcatgatcctattttaaatggattgcgtgatgtaactctagtgactcggttcgttgatgaggaatatctacgatccatcaaaaaacaactgcatccttctaagattattttaatttctgatgtaagatccaaacgaggaggaaatgaacctagtacggcggatttactaagtaattacgctctacaaaatgtcatgattagtattttaaaccccgtggcgtctagtcttaaatggagatgcccgtttccagatcaatggatcaaggacttttatatcccacacggtaataaaatgttacaaccttttgctccttcatattcagctgaaatgagattattaagtatttataccggtgagaacatgagactgactcgagttaccaaattagacgctgtaaattatgaaaaaaagatgtactaccttaataagatcgtccgtaacaaagtagttgttaactttgattatcctaatcaggaatatgactattttcacatgtactttatgctgaggaccgtgtactgcaataaaacatttcctactactaaagcaaaggtactatttctacaacaatctatatttcgtttcttaaatattccaacaacatcaactgaaaaagttagtcatgaaccaatacaacgtaaaatatctagcaaaaattctatgtctaaaaacagaaatagcaagagatccgtacgcggtaataaatagaaacgtactactgagatatactaccgatatagagtataatgatttagttactttaataaccgttagacataaaattgattctatgaaaactgtgtttcaggtatttaacgaatcatccataaattatactccggttgatgatgattatggagaaccaatcattataacatcgtatcttcaaaaaggtcataacaagtttcctgtaaattttctatacatagatgtggtaatatctgacttatttcctagctttgttagactagatactacagaaactaatatagttaatagtgtactacaaacaggcgatggtaaaaagactcttcgtcttcccaaaatgttagagacggaaatagttgtcaagattctctatcgccctaatataccattaaaaattgttagatttttccgcaataacatggtaactggagtagagatagccgatagatctgttatttcagtcgctgattaatcaattagtagagatgagataagaacattataataatcaataatatatcttatatcttatatcttatatcttatatcttgtttagaaaaatgctaatattaaaatagctaacgctagtaatccaatcggaagccatttgatatctataatagggtatctaatttcctgatttaaatagcggacagctatattctcggtagctactcgtttggaatcacaaacattatttacatctaatttactatctgtaatggaaacgtttcccaatgaaatggtacaatccgatacattgcattttgttatatttttttttaaagaggctggtaacaacgcatcgcttcgtttacatggctcgtaccaacaataatagggtaatcttgtatctattcctatccgtactatgcttttatcaggataaatacatttacatcgtatatcgtctttgttagcatcacagaatgcataaatttgttcgtccgtcatgataaaaatttaaagtgtaaatataactattatttttatagttgtaataaaaagggaaatttgattgtatactttcggttctttaaaagaaactgacttgataaaaatggctgtaatctctaaggttacgtatagtctatatgatcaaaaagagattaatgctacagatattatcattagtcatgttaaaaatgacgacgatatcggtaccgttaaagatggtagactaggtgctatggatggggcattatgtaagacttgtgggaaaacggaattggaatgtttcggtcactggggtaaagtaagtatttataaaactcatatagttaagcctgaatttatttcagaaattattcgtttactgaatcatatatgtattcactgcggattattgcgttcacgagaaccgtattccgacgatattaacctaaaagagttatcgggacacgctcttaggagattaaaggataaaatattatccaagaaaaagtcatgttggaacagtgaatgtatgcaaccgtatcaaaaaattactttttcaaagaaaaaggtttgtttcgtcaacaagttggatgatattaacgttcctaattctctcatctatcaaaagttaatttctattcatgaaaagttttggccattattagaaattcatcaatatccagctaacttattttatacagactactttcccatccctccgttgattattagaccggctattagtttttggatagatagtatacccaaagagaccaatgaattaacttacttattaggtatgatcgttaagaattgtaacttgaatgctgatgaacaggttatccagaaggcggtaatagaatacgatgatattaaaattatttctaataacactaccagtatcaatttatcatatattacatccggcaaaaataatatgattagaagttatatcgtcgcccgacgaaaagatcagaccgctagatctgtaattggtcccagtacatctatcaccgttaatgaggtaggaatgcccgcatatattagaaatacacttacagaaaagatatttgttaatgcctttacagtggataaagttaaacaactattagcgtcaaaccaagttaaattttactttaataaacgattaaaccaattaacaagaatacgccaaggaaagtttattaaaaataaaatacatttattgcctggtgattgggtagaagtagctgttcaagaatatacaagtattatttttggaagacagccgtctctacatagatacaacgtcatcgcttcatctatcagagctaccgaaggagatactatcaaaatatctcccggaattgccaactctcaaaatgctgatttcgacggggatgaggaatggatgatattagaacaaaatcctaaagctgtaattgaacaaagtattcttatgtatccgacgacgttactcaaacacgatattcatggagcccccgtttatggatctattcaagatgaaatcgtagcagcgtattcattgtttaggatacaagatctttgtttagatgaagtattgaacatcttggggaaatatggaagagagttcgatcctaaaggtaaatgtaaattcagcggtaaagatatctatacttacttgataggtgaaaagattaattatccgggtctcttaaaggatggtgaaattattgcaaacgacgtagatagtaattttgttgtggctatgaggcatctgtcattggctggactcttatccgatcataagtcgaacgtggaaggtatcaactttattatcaagtcatcttatgtttttaagagatatctatctatttacggttttggggtgacattcaaagatctgagaccaaattcgacgttcactaataaattggaggccatcaacgtagaaaaaatagaacttatcaaagaagcatacgccaaatatctcaacgatgtaagagacgggaaaatagttccattatctaaagctttagaggcggactatgtggaatccatgttatccaacttgacaaatcttaatatccgagagatagaagaacatatgagacaaacgctgatagatgatccagataataacctcctgaaaatggccaaagcgggttataaagtaaatcccacagaactaatgtatattctaggtacgtatggacaacaaaggattgatggtgaaccagcagagactcgagtattgggtagagttttaccttactatcttccagactctaaggatccagaaggaagaggttacattcttaattctttaacaaaaggattaacgggttctcaatattacttttcgatgctggttgccagatctcaatctactgatatcgtctgtgaaacatcacgtaccggaacactggctagaaaaatcattaaaaagatggaggatatggtggtcgacggatacggacaagtagttataggtaatacgctcatcaagtacgccgccaattataccaaaattctaggctcagtatgtaaacctgtagatcttatctatccagatgagtccatgacttggtatttggaaattagtgctctgtggaataaaataaaacagggattcgtttactctcagaaacagaaacttgcaaagaagacattggcgccgtttaatttcctagtattcgtcaaacccaccactgaggataatgctattaaggttaaggatctgtacgatatgattcataacgtcattgatgatgtgagagagaaatacttctttacggtatctaatatagattttatggagtatatattcttgacgcatcttaatccttctagaattagaattacaaaagaaacggctatcactatctttgaaaagttctatgaaaaactcaattatactctaggtggtggaactcctattggaattatttctgcacaggtattgtctgagaagtttacacaacaagccctgtccagttttcacactactgaaaaaagtggtgccgtcaaacaaaaacttggtttcaacgagtttaataacttgactaatttgagtaagaataagaccgaaattatcactctggtatccgatgatatctctaaacttcaatctgttaagattaatttcgaatttgtatgtttgggagaattaaatccaaacatcactcttcgaaaagaaacagataaatatgtagtagatataatagtcaatagattatacatcaagagagcagaaataaccgaattagtcgtcgaatatatgattgaacgatttatctcctttagcgtcattgtaaaggaatggggtatggagacattcattgaggacgaggataatattagatttactgtctacctaaatttcgttgaaccggaagaattgaatcttagtaagtttatgatggttcttccgggggcagccaacaagggaaagattagtaaattcaagattcctatctctgattatacgggatatgacgacttcaatcaaacaaaaaagctcaataagatgactgtagaactcatgaatctaaaagaattgggttctttcgatttggaaaacgtcaacgtgtatcctggagtatggaatacatacgatatcttcggtatcgaggccgctcgtgaatacttgtgcgaagccatgttaaacacctatggagaagggttcgattatctgtatcagccttgtgatcttctcgctagtttactatgtgctagttacgaaccagaatcagtgaataaattcaagttcggcgcagctagtactcttaagagagctacgttcggagacaataaagcattgttaaacgcggctcttcataaaaagtcagaacctattaacgataatagtagctgccacttttttagcaaggtccctaatataggaactggatattacaaatactttatcgacttgggtcttctcatgagaatggaaaggaaactatctgataagatatcttctcaaaagatcaaggaaatggaagaaacagaagacttttaattcttatcaataacatatttttctatgatctgtcttttaaacgatggattttccacaaatgcgcctctcaagtccctcatagaatgatacacgtataaaaaatatagcataggcaatgactccttatttttagacattagatatgccaaaatcatagccccgcttctatttactcccgcagcacaatgaaccaacacgggctcgtttcgttgatcacatttagataaaaaggcggttacgtcgtcaaaatatttactaatatcggtagttgtatcatctaccaacggtatatgaataatattaatattagagttaggtaatgtatatttatccatcgtcaaatttaaaacatatttgaacttaacttcagatgatggtgcatccatagcatttttataatttcccaaatacacattattggttacccttgtcattatagtgggagatttggctttgtgcatatctccagttgaacgtagtagtaagtatttatacaaacttttcttatccatttataacgtacaaatggataaaactactttatcggtaaacgcgtgtaatttagaatacgttagagaaaaggctatagtaggcgtacaagcagccaaaacatcaacacttatattctttgttattatattggcaattagtgcgctattactctggtttcagacgtctgataatccagtctttaatgaattaacgagatatatgcgaattaaaaatacggttaacgattggaaatcattaacggatagcaaaacaaaattagaaagtgatagaggtagacttctagccgctggtaaggatgatatatttgaattcaaatgtgtggatttcggcgcctattttatagctatgcgattggataagaaaacatatctgccgcaagctattaggcgaggtactggagacgcgtggatggttaaaaaggcggcaaaggtcgatccatctgctcaacaattttgtcagtatttgataaaacacaagtctaataatgttattacttgtggtaatgagatgttaaatgaattaggttatagcggttattttatgtcaccgcattggtgttccgattttagtaatatggaatagtgttagataaatgcggtaacgaatgttcctgtaaggaaccataacagcttagatttaacgttaaagatgagcataaacataataaacaaaattacaatcaaacttataacattaatatcaaacaatccaaaaaatgaaatcagtggagtagtaaacgcgtacataactcctggataacgtttagcagctgccgttcctattctagaccaaaaattcggtttcatgttttcgaaacggtattctgcaacaagtcgaggatcgtgttctacatatttggcggcattatccagtatctgcctattgatcttcatttcgttttcgattctggctatttcaaaataaaatcccgatgatagacctccagactttataatttcatctacgatgttcagcgccgtagtaactctaataatataggctgataagctaacatcataccctcctgtatatgtgaatatggcatgatttttgtccattacaagctcggttttaactttattgcctgtaataatttctctcatctgtaggatatctatttttttgtcatgcattgccttcaagacgggacgaagaaacgtaatatcctcaataacgttatcgttttctacaataactacatattctacctttttattttctaactcggtaaaaaaattagaatcccatagggctaaatgtctagcgatatttcttttcgtttcctctgtacacatagtgttacaaaaccctgaaaagaagtgagtatacttgtcatcatttctaatgtttcctccagtccactgtataaacgcataatccttgtaatgatctggatcatccttgactaccacaacatttcttttttctggcataacttcgttgtcctttacatcatcgaacttctgatcattaatatgctcatgaacattaggaaatgtttctgatggaggtctatcaataactggcacaacaataacaggagttttcaccgccgccatttagttattgaaattaatcatatacaactctttaatacgagttatattttcgtctatccattgtttcacattgacatatttcgacaaaaagatataaaatgcgtattccaatgcttctctgtttaatgaattactaaaatatacaaacacgtcactgtctggcaataaatgatatcttagaatattgtaacaatttattttgtattgcacatgttcgtgatctatgagttcttcttcgaatggcataggatctccgaatctgaaaacgtataaataggagttagaataataatatttgagagtattggtaatatataaactctttagcggtataattagtttttttctctcaatttctatttttagatgtgatggaaaaatgactaattttgtagcattagtatcatgaactctaatcaaaatcttaatatcttcgtcacacgttagctctttgaagtttttaagagatgcatcagttggttctacagatggagtaggtgcaacaattttttgttctacacatgtatgtactggagccattgttttaactataatggtgcttgtatcgaaaaactttaatgcagatagcggaagctcttcgccgcgactttctacgtcgtaattgggttctaacgccgatctctgaatggatactagttttctaagttctaatgtgattctctgaaaatgtaaatccaattcctccggcattatagatgtgtatacatcggtaaataaaactatagtatccaacgatcccttctcgcaaattctagtcttaaccaaaaaatcgtatataaccacggagatggcgtatttaagagtggattcttctaccgttttgttcttggatgtcatataggaaactataaagtccgcactactgttaagaatgattactaacgcaactatatagtttaaattaagcattttggaaacataaaataactctgtagacgatacttgactttcgaataagtttgcagacaaacgaagaaagaacagacctctcttaatttcagaagaaaactttttttcgtattcctgacgtctagagtttatatcaataagaaagttaagaattagtcggttaatgttgtatttcattacccaagtttgagatttcataatattatcaaaagacatgataatattaaagataaagcgctgactatgaacgaaatagctatatggttcgctcaagaatatagtcttgttaaacgtggaaacgataactgtatttttaatcacgtcagcggcatctaaattaaatataggtatatttattccacacactctacaatatgccacaccatcttcataataaataaattcgttagcaaaattattaattttagtgaaatagttagcgtcaactttcatagcttccttcaatctaatttgatgctcacacggtgcgaattccactctaacatcccttttccatgcctcaggttcatcgatctctataatatctagttttttgcgtttcacaaacacaggctcgtctctcgcgatgagatctgtatagtaactatgtaaatgataactagatagaaagatgtagctatatagatgacgatcctttaagagaggtataataactttaccccaatcagatagactgttgttatggtcttcggaaaaagaatttttataaatttttccagtattttccaaatatacgtacttaacatctaaaaaatccttaatgataataggaatggataatccgtctattttataaagaaatacatatcgcacattatacttttttttggaaatgggaataccgatgtgtctacataaatatgcaaagtctaaatattttttagagaatcttagttggtccaaattcttttccaagtacggtaatagatttttcatattgaacggtatcttcttaatctctggttctagttccgcattaaatgatgaaactaagtcactatttttataactaacgattacatcacctctaacatcatcatttaccagaatactgatcttcttttgtcgtaaatacatgtctaatgtgttaaaaaaaagatcatacaagttatacgtcatttcatctgtggtattcttgtcattgaaggataaactcgtactaatctcttctttaacagcctgttcaaatttatatcctatatacgaaaaaatagcaaccagtgtttgatcatccgcgtcaatattctgttctatcgtagtgtataacaatcgtatatcttcttctgtgatagtcgatacgttataaaggttgataacgaaaatatttttatttcgtgaaataaagtcatcgtaggattttggacttatattcgcgtctagtagatatgcttttatttttggaatgatctcaattagaatagtctctttagagtccatttaaagttacaaacaactaggaaattggtttatgatgtataatttttttagtttttatagattctttattctatacttaaaaaatgaaaataaatacaaaggttcttgagggttgtgttaaattgaaagcgagaaataatcataaattatttcattatcgcgatatccgttaagtttgtatcgtaatggcgtggtcaattacgaataaagcggatactagtagcttcacaaagatggctgaaatcagagctcatctaaaaaatagcgctgaaaataaagataaaaacgaggatattttcccggaagatgtaataattccatctactaagcccaaaaccaaacgagccactactcctcgtaaaccagcggctactaaaagatcaaccaaaaaggaggaagtggaagaagaagtagttatagaggaatatcatcaaacaactgaaaaaaattctccatctcctggagtcagcgacattgtagaaagcgtggccgctgtagagctcgatgatagcgacggggatgatgaacctatggtacaagttgaagctggtaaagtaaatcatagtgctagaagcgatctctctgacctaaaggtggctaccgacaatatcgttaaagatcttaagaaaattattactagaatctctgcagtatcgacggttctagaggatgttcaagcagctggtatctctagacaatttacttctatgactaaagctattacaacactatctgatctagtcaccgagggaaaatctaaagttgttcgtaaaaaagttaaaacttgtaagaagtaaatgcgtgcacttttttataaagatggtaaactctttaccgataataattttttaaatcctgtatcagacgataatccagcgtatgaggttttgcaacatgttaaaattcctactcatttaacagatgtagtagtatatgaacaaacgtgggaggaggcgttaactagattaatttttgtgggaagtgattcaaaaggacgtagacaatacttttacggaaaaatgcatgtacagaatcgcaacgctaaaagagatcgtatttttgttagagtatataacgttatgaaacgaattaattgttttataaacaaaaatataaagaaatcgtccacagattccaattatcagttggcggtttttatgttaatggaaactatgttttttattagatttggtaaaatgaaatatcttaaggagaatgaaacagtagggttattaacactaaaaaataaacacatagaaataagtcccgatgaaatagttatcaagtttgtaggaaaggacaaagtttcacatgaatttgttgttcataagtctaatagactatataaaccgctattgaaactgacggatgattctagtcccgaagaatttctgttcaacaaactaagtgaacgaaaggtatacgaatgtatcaaacagtttggtattagaatcaaggatctccgaacgtatggagtcaattatacgtttttatataatttttggacaaatgtaaagtccatatctcctcttccgtcaccaaaaaagttaatagcattaactatcaaacaaactgctgaagtggtaggtcatactccatcaatttcaaaaagagcttatatggcaacgactattttagaaatggtaaaggataaaaattttttagatgtagtatctaaaactacgttcgatgaattcctatctatagtcgtagatcacgttaaatcatctacggatggatgatatagatctttacacaaataattacaagaccgataaatggaaatggataagcgtatgaaatctctcgcaatgacagctttcttcggagagctaagcacattagatattatggcattgataatgtctatatttaaacgccatccaaacaataccattttttcagtggataaggatggtcagtttatgattgatttcgaatacgataattataaggcttctcaatatttggatctgaccctcactccgatatctggagatgaatgcaagactcacgcatcgagtatagccgaacaattggcgtgtgcggatattattaaagaggatattagcgaatatatcaaaactactccccgtcttaaacgatttataaaaaaataccgcaatagatcagatactcgtatcagtcgagatacagaaaagcttaaaatagctctagctaaaggcatagattacgaatatataaaagacgcttgttaataagtaaatgaaaaaaaactagtcgtttataataaaacacgatatggatgccaacgtagtatcattttctactattgcgacgtatatagacgctttagcgaagaatgcttcggaattagaacagaggtctaccgcatacgaaataaataatgaattggaactagtatttattaagccgccattgattactttgacaaatgtagtgaatatctctacgattcaggaatcgtttattcgatttaccgttactaataaggaaggtgttaaaattagaactaagattccattatctaaggtacatggtctagatgtaaaaaatgtacagttagtagatgctatagataacatagtttgggaaaagaaatcattagtgacggaaaatcgtcttcacaaagaatgcttgttgagactatcgacagaggaacgtcatatatttttggattacaagaaatatggatcctctatccgactagaattagtcaatcttattcaagcaaaaacaaaaaactttacgatagactttaagctaaaatattttctaggatccggtgcccagtctaaaagttctttgttgcacgctattaatcatccaaagtcaaggcctaatacatctctggaaatagaattcacacctagagacaatgaaacagttccatatgatgaactaataaaggaattgacgactctctcgcgtcatatatttatggcttctccagagaatgtaattctttctccgcctattaacgcgcctataaaaacctttatgttgcctaaacaagatatagtaggtttggatctggaaaatctatatgccgtaactaagactgacggcattcctataactatcagagttacatcaaacgggttgtattgttattttacacatcttggttatattattagatatcctgttaagagaataatagattccgaagtagtagtctttggtgaggcagttaaggataagaactggaccgtatatctcattaagctaatagagcctgtgaatgcaatcaatgatagactagaagaaagtaagtatgttgaatctaaactagtggatatttgtgatcggatagtattcaagtcaaagaaatacgaaggtccgtttactacaactagtgaagtcgtcgatatgttatctacatatttaccaaagcaaccagaaggtgttattctgttctattcaaagggacctaaatctaacattgattttaaaattaaaaaggaaaatactatagaccaaactgcaaatgtagtatttaggtacatgtccagtgaaccaattatctttggagaatcgtctatctttgtagagtataagaaatttagcaacgataaaggctttcctaaagaatatggttctggtaagattgtgttatataacggcgttaattatctaaataatatctattgtttggaatatattaatacacataatgaagtgggtattaagtccgtggttgtacctattaagtttatagcagaattcttagttaatggagaaatacttaaacctagaattgataaaaccatgaaatatattaactcagaagattattatggaaatcaacataatatcatagtcgaacatttaagagatcaaagcatcaaaataggagatatctttaacgaggataaactatcggatgtgggacatcaatacgccaataatgataaatttagattaaatccagaagttagttattttacgaataaacgaactagaggaccgttgggaattttatcaaactacgtcaagactcttcttatttctatgtattgttccaaaacatttttagacgattccaacaaacgaaaggtattggcgattgattttggaaacggtgctgacctggaaaaatacttttatggagagattgcgttattggtagcgacggatccggatgctgatgctatagctagaggaaatgaaagatacaacaaattaaactctggaattaaaaccaagtactacaaatttgactacattcaggaaactattcgatccgatacatttgtctctagtgtcagagaagtattctattttggaaagtttaatatcatcgactggcagtttgctatccattattcttttcatccgagacattatgctaccgtcatgaataacttatccgaactaactgcttctggaggcaaggtattaatcactaccatggacggagacaaattatcaaaattaacagataaaaagacttttataattcataagaatttacctagtagcgaaaactatatgtctgtagaaaaaatagctgatgatagaatagtggtatataatccatcaacaatgtctactccaatgactgaatacattatcaaaaagaacgatatagtcagagtgtttaacgaatacggatttgttcttgtagataacgttgatttcgctacaattatagaacgaagtaaaaagtttattaatggcgcatctacaatggaagatagaccgtctacaaaaaactttttcgaactaaatagaggagccattaaatgtgaaggtttagatgtcgaagacttacttagttactatgttgtttatgtcttttctaagcggtaaataataatatggtatgggttctgatctcccagttctaaatgcattaaataattccaatagagcgatttttgttcctataggaccttccaactgtggatactctgtattgttaatagatatattaatacttttgtcgggtaacagaggttctacgtcttctaaaaataaaagttttataacatctggcctgttcataaataaaaacttggcgattctatatatactcttattatcaaatctagccattgtcttatagatgtgagctactgtaggtgtaccatttgattttctttctaatactatatatttctctcgaagaagttcttgcacatcatctgggaataaaatactactgttgagtaaatcagttattttttttatatcgatattgatggacatttttatagttaaggataataagtatcccaaagtcgataacgacgataacgaagtatttatacttttaggaaatcacaatgactttatcagattaaaattaacaaaattaaaggagcatgtatttttttctgaatatattgtgactccagatacatatggatctttatgcgtcgaattaaatgggtctagttttcagcacggcggtagatatatagaggtggaggaatttatagatgctggaagacaagttagatggtgttctacatccaatcatatatctaaagatatacccgaagatatgcacactgataaatttgtcatttatgatatttatacgtttgattcgttcaagaataaacgattggtattcgtacaggtacctccgtcgttaggagatgatagtcatttgactaatccgttattgtcaccgtattatcgtaattcagtagccagacaaatggtcaatgatatgatttttaatcaagattcatttttaaaatatttattagaacatctgattagaagccactatagagtttctaaacatataacaatagttagatacaaggataccgaagaattaaatctaacgagaatatgttataatagagataagtttaaggcgtttgtattcgcttggtttaacggcgtttcggaaaatgaaaaggtactagatacgtataaaaaggtatctaatttgatataatgaattcagtgactgtatcacacgcgccatatactattacttatcacgatgattgggaaccagtaatgagtcaattggtagagttttataacgaagtagccagttggctgctacgagacgagacgtcgcctattcctgataagttctttatacagttgaaacaaccgcttagaaataaacgagtatgtgtgtgtggtatagatccgtatccgaaagatggaactggtgtaccgttcgaatcaccaaattttacaaaaaaatcaattaaggagatagcttcatctatatctagattaaccggagtaattgattataaaggttataaccttaatataatagacggggttataccctggaattattacttaagttgtaaattaggagaaacaaaaagtcacgcgatttactgggataagatttccaagttactgctgcagcatataactaaacacgttagtgttctttattgtttgggtaaaacagatttctcgaatatacgggccaagttagaatccccggtaactaccatagtcggatatcatccagcggctagagaccgccaattcgagaaagatagatcatttgaaattatcaacgttttactggaattagacaacaaggcacctataaattgggctcaagggtttatttattaatgctttagtgaaattttaacttgtgttctaaatggatgcggctattagaggtaatgatgttatctttgttcttaagactataggtgtcccgtcagcgtgcagacaaaatgaagatccaagatttgtagaagcatttaaatgcgacgagttagaaagatatattgagaataatccagaatgtacactattcgaaagtcttagggatgaggaagcatactctatagtcagaattttcatggatgtagatttagacgcgtgtctagacgaaatagattatttaacggccattcaagattttattatcgaggtgtcaaactgtgtagctagattcgcgtttacagaatgcggcgccattcatgaaaatgtaataaaatccatgagatctaatttttcattgactaagtctacaaatagagataaaacaagttttcatattatctttttagatacgtataccactatggatacattgatagctatgaaacgaacactattagaattaagtagatcatctgaaaatccactaaccagatcgatagacactgccgtatataggagaaaaacaactcttcgggttgtaggtactaggaaaaatccaaattgcgacactattcatgtaatgcaaccaccgcatgataatatagaagattacctattcacttacgtggatatgaacaacaatagttattacttttctctacaacaacgattggaggatttagttcctgataagttatgggaaccagggtttatttcattcgaagacgctataaaaagagtttcaaaaatattcattaattctataataaactttaatgatctcgatgaaaataattttacaacggtaccactggtcatagattacgtaacaccttgtgcattatgtaaaaaacgatcgcataaacatccgcatcaactatcgttggaaaatggtgctattagaatttacaaaactggtaatccacatagttgtaaagttaaaattgttccgttggatggtaataaactgtttaatattgcacaaagaattttagacactaactctgttttattaaccgaacgaggagaccatatagtttggattaataattcatggaaatttaacagcgaagaacccttgataacaaaactaattttgtcaataagacatcaactacctaaggaatattcaagcgaattactctgtccaagaaaacgaaagactgtagaagctaacatacgagacatgttagtagattcagtggagaccgatacctatccggataaacttccgtttaaaaatggtgtattggacctggtagacggaatgttttactctggagatgatgctaaaaaatatacgtgtactgtatcaaccggatttaaatttgacgatacaaagttcgtcgaagacagtccagaaatggaagagttaatgaatatcattaacgatatccaaccattaacggatgaaaataagaaaaatagagagctatatgaaaaaacattatctagttgtttatgcggtgctaccaaaggatgtttaacattcttttttggagaaactgcaactggaaagtcgacaaccaaacgtttgttaaagtctgctatcggtgacctgtttgttgagacgggtcaaacaattttaacagatgtattggataaaggacctaatccatttatcgctaacatgcatttgaaaagatctgtattctgtagcgaactacctgattttgcctgtagtggatcaaagaaaattagatctgacaatattaaaaagttgacagaaccttgtgtcattggaagaccgtgtttctccaataaaattaataatagaaaccatgcgacaatcattatcgatactaattacaaacctgtttttgataggatagataacgcattaatgagaagaattgccgtcgtgcgattcagaacacacttttctcaaccttctggtagagaggctgctgaaaataatgacgcgtacgataaagtcaaactattagacgaggggttagatggtaaaatacaaaataatatatatagatttgcatttctatacttgttggtgaaatggtacaaaaaatatcatgttcctattatgaaactatatcctacacccgaagagattcctgactttgcattctatctcaaaataggtactctgttggtatctagctctgtaaagcatattccattaatgacggacctctccaaaaagggatatatattgtacgataatgtggtcactcttccgttgactactttccaacagaaaatatccaagtattttaattctagactatttggacacgatatagagagcttcatcaatagacataagaaatttgccaatgttagtgatgaatatctgcaatatatattcatagaggatatttcatctccgtaaatatatgctcatatatttatagaagatatcacatatctaaatgaataccggaatcatagatttatttgataatcatgttgatagtataccaactatattacctcatcagttagctactctagattatctagttagaactatcatagatgagaacagaagcgtgttattgttccatattatgggatcaggtaaaacaataatcgctttgttgttcgccttggtagcttccagatttaaaaaggtttacattctagtgccgaacatcaacatcttaaaaattttcaattataatatgggtgtagctatgaacttgtttaatgacgaattcatagctgagaatatctttattcattccacaacaagtttttattctcttaattataacgataacgtcattaattataacggattatctcgctacaataactctatttttatcgttgatgaggcacataatatctttgggaataatactggagaacttatgaccgtgataaaaaataaaaacaagattccttttttactattgtctggatctcccattactaacacacctaatactctgggtcatattatagatttaatgtccgaagagacgatagattttggtgaaattattagtcgtggtaagaaagtaattcagacacttcttaacgaacgcggtgtgaatgtacttaaggatttgcttaaaggaagaatatcatattacgaaatgcctgataaagatctaccaacgataagatatcacggacgtaagtttctagatactagagtagtatattgtcacatgtctaaacttcaagagagagattatatgattactagacgacagctatgttatcatgaaatgtttgataaaaatatgtataacgtgtcaatggcagtattgggacaacttaatctgatgaataatttagatactttatttcaggaacaggataaggaattgtacccaaatctgaaaataaataatggcgtgttatacggagaagaattggtaacgttaaacattagttccaaatttaaatactttattaatcggatacagacactcaacggaaaacattttatatacttttctaattctacatatggcggattggtaattaaatatatcatgctcagtaatggatattctgaatataatggttctcagggaactaatccacatatgataaacggcaaaccaaaaacatttgctatcgttactagtaaaatgaaatcgtctttagaggatctattagatgtgtataattctcctgaaaacgatgatggtagtcaattgatgtttttgttttcatcaaacattatgtccgaatcctatactctaaaagaggtaaggcatatttggtttatgactatcccagatactttttctcaatacaaccaaattcttggacgatctattagaaaattctcttacgccgatatttctgaaccagttaatgtatatcttttagccgccgtatattccgatttcaatgacgaagtgacgtcattaaacgattacacacaggatgaattaattaatgttttaccatttgacatcaaaaagctgttgtatctaaaatttaagacgaaagaaacgaatagaatatactctattcttcaagagatgtctgaaacgtattctcttccaccacatccatcaattgtaaaagttttattgggagaattggtcagacaatttttttataataattctcgtattaagtataacgataccaagttacttaaaatggttacatcagttataaaaaataaagaagacgctaggaattacatagatgatattgtaaacggtcacttctttgtatcgaataaagtatttgataaatctcttttatacaaatacgaaaacgatattattacagtaccgtttagactttcctacgaaccatttgtttggggagttaactttcgtaaagaatataacgtggtatcttctccataaaactgatgagatatataaagaaataaatgtcgagctttgttaccaatggatacctttccgttacattggaaccacacgagctgacgttagacataaaaactaatattaggaatgccgtatataagacgtatctccatagagaaattagtggtaaaatggccaagaaaatagaaattcgtgaagacgtggaattacctctcggcgaaatagttaataattctgtagttataaacgttccgtgtgtaataacctacgcgtattatcacgttggggatatagtcagaggaacattaaacatcgaagatgaatcaaatgtaactattcaatgtggagatttaatctgtaaactaagtagagattcgggtactgtatcatttagcgattcaaagtactgcttttttcgaaatggtaatgcgtatgacaatggcagcgaagtcactgccgttctaatggaggctcaacaaggtatcgaatctagttttgtttttctcgcgaatatcgtcgactcataaaaaagagaatagcggtaagtataaacacgaatactatggcaataattgcgaatgttttattctcttcgatatatttttgataatatgaaaaacatgtctctctcaaatcggacaaccatctcataaaatagttctcgcgcgctggagaggtagttgccgctcgtataatctctccagaataatatacttgcgtgtcgtcgttcaatttatacggatttctatagttctctgttatataatgcggtttgccctcatgattagacgacgacaatagtgttctaaatttagatagttgatcagaatgaatgtttattggcgttggaaaaattatccatacagcgtctgcagagtggttgatagttgttcctagatatgtaaaataatccaacttactaggcagcaaattgtctagataaaatactgaatcaaacggtgcagacgtattggcggatctaatggaatccaattgattaactatcttttgaaaatatacatttttatgatccaatacttgtaagaatatagaaataatgataagtccatcatcgtgtttttttgcctcttcataagaactatattttttcttattccaatgaacaagattaatctctccagagtatttgtacacatctatcaagtgattggatccataatcgtcttcctttccccaatatatatgtagtgatgataacacatattcattggggagaaaccctccacttatatatcctcctttaaaattaatccttactagttttccagtgttctggatagtggttggtttcgactcattataatgtatgtctaacggcttcaatcgcgcgttagaaattgcttttttagtttctatattaataggagatagttgttgcggcatagtaaaaatgaaatgataactgtttaaaaatagctcttagtatgggaattacaatggatgaggaagtgatatttgaaactcctagagaattaatatctattaaacgaataaaagatattccaagatcaaaagacacgcatgtgtttgctgcgtgtataacaagtgacggatatccgttaataggagctagaagaacttcattcgcgttccaggcgatattatctcaacaaaattcagattctatctttagagtatccactaaactattacggtttatgtactacaatgaactaagagaaatctttagacggttgagaaaaggttctatcaacaatatcgatcctcactttgaagagttaatattattgggtggtaaactagataaaaaggaatctattaaagattgtttaagaagagaattaaaagaggaaagtgatgaacgtataacagtaaaagaatttggaaatgtaattctaaaacttacaacacgggataaattatttaataaagtatatataagttattgcatggcgtgttttattaatcaatcgttggaggatttatcgcatactagtatttacaatgtagaaattagaaagattaaatcattaaatgattgtattaacgacgataaatacgaatatctgtcttatatttataatatgctagttaatagtaaatgaacttttacagatctagtataattagtcagattattaagtataatagacgactagctaagtctattatttgcgaggatgactctcaaattattacactcacggcattcgttaaccaatgcctatggtgtcataaacgagtatccgtgtccgctattttattaactactgataacaaaatattagtatgtaacagacgagatagttttctctattctgaaataattagaactagaaacatgtttagaaagaaacgattatttctgaattattccaattatttgaacaaacaggaaagaagtatactatcgtcatttttttctctagatccagctactactgataatgatagaatagacgctatttatccgggtggcatacccaaaaggggtgagaatgttccagagtgtttatccagggaaattaaagaagaagttaatatagacaattcttttgtattcatagacactcggttttttattcatggcatcatagaagataccattattaataaattttttgaggtaatcttctttgtcggaagaatatctctaacgagtgatcaaatcattgatacatttaaaagtaatcatgaaatcaaggatctaatatttttagatccgaattcaggtaatggactccaatacgaaattgcaaaatatgctctagatactgcaaaacttaaatgttacggccatagaggatgttattatgaatcattaaaaaaattaactgaggatgattgattaaaaaatataaattaatttaccatcgtgtatttttataacgggattgtccggcatatcatgtagatagttaccgtctacatcgtatactcgaccatctacgcctttaaatcctctatttattgacattaatctattagaattggaataccaaatattagtaccctcaattagtttattggtaatattttttttagacgatagatcgatggctcttgaaaccaaggttttccaaccggactcattgtcgatcggtgagaagtctttttcattagcatgaatccattctaatgatgtatgtttaaacactctaaacaattggacaaattcttttgatttgctttgaatgatttcaaataggtcttcgtctacagtaggcataccattagataatctagccattataaagtgcacgtttacatatctacgttctggaggagtaagaacgtgactattgagacgaatggctcttcctactatctgacgaagagacgcctcgttccatgtcatatctaaaatgaagatatcattaattgagaaaaaactaataccctcgcctccactagaagagaatacgcatgttttaatgcattctccgttagtgtttgattcttggttaaactcagccaccgccttgattctagtatcttttgttctagatgagaactctatattagagataccaaagactttgaaatatagtaataagatttctattcctgactgattaacaaatggttcaaagactagacatttaccatgggatgctaatattcccaaacatacatctataaatttgacgcttttctcttttaattcagtaaatagagagatatcagccgcactagcatcccctttcaatagttctccctttttaaaggtatctaatgcggatttagaaaactctctatctcttaatgaatttttaaaatcattatatagtgttgctatctcttgcgcgtattcgcccggatcacgattttgtctttcaggaaagctatcgaacgtaaacgtagtagccatacgtctcagaattctaaatgatgatatacctgtttttatttcagcgagtttagccttttgataaatttcttcttgctttttcgacatattaacgtatcgcattaatactgttttcttagcgaatgatgcagacccttctacgtcatcaaaaatagaaaactcgttattaactatatacgaacatagtcctcctagtttggagactaattctttttcatcgactagacgtttattctcaaatagcgattggtgttgtaaggatcctggtcgtagtaagttaaccaacatggtgaattcttgcacactattgacgataggtgtagccgataaacaaatcatcttatggttttttaacgcaatggtcttagataaaaaattatatactgaacgagtaggacggatcttaccatcttctttgattaatgatttagaaatgaagttatgacattcatcaataatgacgcatattctactcttggaattaatagttttgatattagtaaaaaatttatttctaaaattttgatcatcgtaattaataaaaatacaatccttcgttatctctggagcgtatctgagtatagtgttcatccaaggatcttctatcaaagcctttttcaccaataagataatagcccaattcgtataaatatccttaagatgtttgagaatatatacagtagtcattgttttaccgacacccgtttcatggaacaataaaagagaatgcatactgtctaatcctaagaaaactcttgctacaaaatgttgataatccttgaggcgtactacgtccgaccccatcatttcaacgggcatattagtagttctgcgtaaggcataatcgatataggccgcgtgtgatttactcatttatgagtgataagtaataactatgttttaaaaatcacagcagtagtttaactagtcttctctgatgtttgttttcgatactttttgaatcagaagtcatactagaataaagcaacgagtgaacgtaatagagagcttcgtatactctattcgaaaactctaagaacttattaatgaattccgtatccactggattgtttaaaatactaaattgaacactgttcacatccttccaagaagaagacttagtgacggacttaacatgagacataaataaatccaaattttttttacaaacatcactagccaccataatggcgctatctttcaaccagctatcgcttacgcattttagcagtctaacatttttaaagagactacaatatattctcatagtatcgattacacctctaccgaataaagttggaagtttaataatacaatatttttcgtttacaaaatcaaataatggtcgaaacacgtcgaaggttaacatcttataatcgctaatgtatagattgttttcagtgagatgattattagatttaatagcatctcgttcacgtttgaacagtttattgcgtgcgctgaggtcggcaactacggcgtccgctttagtactcctcccataatactttacgctattaatctttaaaatttcatagactttatctagatcgctttctggtaacatgatatcatgtgtaaaaagttttaacatgtcggtcggcattctatttagatcattaactctagaaatctgaagaaagtaattagctccgtattccagactaggtaatgggcttttacctagagacagattaagttctggcaatgtttcataaaatggaagaaggacatgcgttccctcccggatattttttacaatttcatccatttacaactctatagtttgttttcattattattagttattatctcccataatcttggtaatacttaccccttgatcgtaagataccttatacaggtcattacatacaactaccaattgtttttgtacataatagattggatggttgacatccatggtggaataaactactcgaacagatagtttatctttccccctagatacattagccgtaatagttgtcggcctaaagaatatctttggtgtaaagttaaaagttagggttcttgttccattattgctttttgtcagtagttcattataaattctcgagatgggtccgttctctgaatatagaacatcatttccaaatctaacttctagtctagaaataatatcggtcttattcttaaaatctattcccttgatgaagggatcgttaatgaacaaatccttggcctttgattcggctgatctattatctccgttatagacgttacgttgactagtccaaagacttacaggaatagatgtatcgatgatgttgatactatgtgatatgtgagcaaagattgttctcttagtggcatcactatatgttccagtaatggcggaaaactttttagaaatgttatatataaaagaattttttcgtgttccaaacattagcagattagtatgaagataaacactcatattatcaggaacattatcaatttttacatacacatcagcatcttgaatagaaacgataccatcttctggaacctctacgatctcggcagactccggataaccagtcggtgggccatcgctaacaataactagatcatccaacaatctactcacatatgcatctatataatctttttcatcttgtgagtaccctggatacgaaataaatttattatccgtatttccataataaggtttagtataaacagagagagatgttgccgcatgaacttcagttacagtcgccgttggttggtttatttgacctattactctcctaggtttctctataaacgatggtttaatttgtacattcttaaccatatatccaataaagctcaattcaggaacataaacaaattctttgttgaacgtttcaaagtcgaacgaagagtcacgaataacgatatcggatactggattgaaggttaccgttacggtaatttttgaatcggatagtttaagactgctgaatgtatcttccacatcaaacggagttttaatataaacgtatactgtagatggttctttaatagtgtcattaggagttaggccaatagaaatatcattaagttcactagaatatccagagtgtttcaaagcaattgtattattgatacaattattatataattcttcgccctcaatttcccaaataacaccgttacacgaagagatagatacgtgattaatacatttatatccaacatatggtacgtaactgaatcttcccatacctttaacttctggaagttccaaactcagaaccaaatgattaagcgcagtaatatactgatccctaatttcgaagctagcgatagcctgattgtctggaccatcgtttgtcataactccggatagagaaatatattgcggcatatacaaagttggaatttgactatcgactgcgaagacattagaccgtttaatagagtcatccccaccgatcaaagaattaatgatagtattattcattttctatttaaaatggaaaaagcttacaataaactccgtagagaaatatctataatttgtgagttttccttaaagtaacagcttccgtaaacgccgtctttatctcttagtaggtttattgtatttatgaccttttccttatcttcatagaatactaaaggcaacaaagaaatttttggttcttctctaagagctacgtgagacttaaccatagaagccaacgaatccctacatattttagaacagaaataccctacttcaccacccttgtatgtctcaatactaataggtctaaaaaccaaatcttgattacaaaaccaacacttatcaattacactatttgtcttaatagacacatctgccatagatttataatactttggtagtatacaagcgagtgcttcttctttagcgggcttaaagactgctttaggtgctgaaataaccacatctggaaggcttactcgcttagccatttaattacggaactatttttttatacttctaatgagcaagtagaaaacctctcatctacaaaaacgtactcgtgtccataatcctctaccatagttacacgttttttagatctcatatgtgctaaaaagttttcccatactaattggttactattatttttcgtataatttttaacagtttgaggttttagatttttagttacagaagtgatatcgaatattttatccaaaaagaatgaataattaattgtcttagaaggagtgttttcttggcaaaagaataccaagtgcttaaatatttctactacttcattaatcttttctgtactcagattcagtttctcatcttttacttgattgattatttcaaagactaacttataatcctttttatttattctctcgttagccttaagaaaactagatacaaaatttgcatctacatcatccgtggatatttgatttttttccatgatatccaagagttccgagataatttctccagaacattgatgagacaataatctccgcaatacatttctcaaatgaataagtttattagacacgtggaagtttgactttttttgtacctttgtacatttttgaaataccgactcgcaaaaaatacaatattcatatccttgttcagatactataccgttatgtctacaaccgctacataatcgtagattcatgttaacactctacgtatctcgtcgtccaatattttatataaaaacattttatttctagacgttgccagaaaatcctgtaatatttttagttttttgggctgtgaataaagtatcgccctaatattgttaccgtcttccgccaatatagtagttaaattatccgcacatgcagaagaacaccgcttaggcggattcagtacaatgttatatttttcgtaccaactcatttaaatatcataatctaaaatagttctgtaatatgtctagcgctaatatattgatcataatcctgtgcataaattaagatacaacaatgtctcgaaatcatcgacatggcttcttccatagttagaagatcgtcgtcaaagttagcaacgtgattcatcaacatttgctgttttgaggcagcaaatactgaaccgtcgccattcaaccattcataaaaaccatcgtctgaatccattgataatttcttgtactggtttttgagagctcgcatcaatctagcatttctagctcccggattgaaaacagaaagaggatcgtacatccagggtccattttctgtaaatagaatcgtataatgtcccttcaagaagatatcagacgatccacaatcaaagaattggtctccgagtttgtaacaaactgcggactttaacctatacatgataccgtttagcataatttctggtgatacgtcaatcggagtatcatctattagagatctaaagccggtgtaacattctccaccaaacatattcttattctgacgtcgttctacataaaacatcattgctccattaacgataacaggggaatgaacagcactacccatcacattagttcccaatggatcaatgtgtgtaactccagaacatcttccatagcctatgttaggaggagcgaacaccactcttccactattgccatcgaatgccatagaataaatatccttggaattgatagaaatcggactgtcggatgttgtgatcatcttcataggattaacaactatgtatggtgccgcctgaagtttcatatcgtaactgatgccgtttataggtctagccacagaaaccaacgtaggtctaaatccaactatagacaaaatagaagccaatatctgttcctcatctgtcataacttgagagcatccagtatgaataatcttcattagatggggatctaccgcatcatcatcgttacaataaaaaattcccattctaatgttcataattgcttttctaatcatggtatgcatgtttgctctctgaatctctgtggaaattagatctgatacacctgtaatcactatcggattatcctccgtaagacgattaaccaacaacatataattataagactttacttttctaaattcataaagttgctggattaggctataggtgtctccatgtacatacgcgttctcgagcgcaggaagtttaataccgaatagtgccatcagaataggatgaatatagtaattagtttctggttttctataaataaaagacaaatcttgtgaactagacatatcggtaaaatgcatggattggaatcgtgtagtcgacagaagaatatgatgattagatggagagtatattttatctaactctttgagttggtcaccgattctaggactagctcgagaatgaataagtactaaaggatgagtacatttcacagaaacactagcattgttcaatgtgctctttacatgggtaaggagttgaaatagctcgtttctatttgttctgacaatatttagtttattcataatgttaagcatatcctgaatagtaaagttagatgtgtcatacttgttagtagttagatatttagcaattgcattcccatcatttctcaatctcgtactccaatcatgcgtggatgctacttcgtcgatggaaaccatacaatcctttttgataggctgttgagattgatcatttcctgcacgtttaggtttggtacgttgatttctagcccctgcggatataaagtcatcgtctacaatttgggacaatgaattgcatacactacaagacaaagatttatcagaagtgtgaatatgatcttcatctaccaaagaaagagtttgattagtataactagattttagtcctgcgttagatgttaaaaaaacatcgctattgaccacggcttccattatttatattcgtagtttttactcgaaagcgtgattttaatatccaatcttattacttttggaatcgttcaaaacctttgactagttgtagaatttgatctattgccctacgcgtatactcccttgcatcatatacgttcgtcaccagatcgtttgtttcggcctgaagttggtgcatatctctttcaacattcgacatgagatccttaagggccatatcgtctagattttgttgagatgctgctcctggatttggattttgttgtgctgttgtacatactgtaccaccagtaggtgtaggagtacatacagtggccacaataggaggttgagaaagtgtaaccgttggagtagtacaagaaatacttccatccgattgttgtgtacatgtagttgttggtaacgtctgagaaggttgggtagatggcggcgtcgtcgttttttgatctttattaaatttagagataatatcctgaacagcattgctcggcgtcaacgctggaaggagtgaactcgccggcgcatcagtatcttcagacagccaatcaaaaagattagacatatcagatgatgtattagtttgttgtcgtggttttggtgtaggagcagtactactaggtagaagaataggagccgatgtagctgttggaaccggctgtggagttatatgaatagttggttgtagcggttggataggctgtctgctggcggccatcatattatctctagctagttgttctcgcaactgtctttgataatacgactcttgagactttagtcctatttcaatcgcttcatcctttttcgtatccggatccttttcttcagaataatagattgacgactttggtgtagaggattctgccagcctctgtgagaacttgttaaagaagtccatttaaggctttaaaattgaattgcgattataagattaaatggcagacacagacgatattatcgactatgaatccgatgatctcaccgaatacgaggatgatgaagaagaggaagaagatggagagtcactagaaactagtgatatagatcccaaatcttcttataagattgtagaatcagcatccactcatatagaagatgcgcattccaatcttaaacatatagggaatcatatatctgctcttaaacgacgctatactagacgtataagtctatttgaaatagcgggtataatagcagaaagctataacttgcttcaacgaggaagattacctctagtttcagaattttctgacgaaacgatgaagcaaaatatgctacatgtaattatacaagagatagaggagggttcttgtcctatagtcatcgaaaagaacggagaattgttgtcggtaaacgattttgacaaagatggtctaaaattccatctagactatattatcaaaatttggaaacttcaaaaacgatattagaatttatacgaatatcgttctctaaatgtcacaatcaagtctcgcatgttcagcaatttattgtcgtactttatatcgtgttcattaacgatatcttgcaaaatagtaatgattctatcttccttcgatagatattcttcagagattattgtcttatattctttcttgttatcagatatgaatttgataagactttgaacattattgatacccgtctgtttaattttttctacagatattttagttttggcagattctatcgtatctgtcaatagacatccaacatcgacattcgacgtcaattgtctataaatcaacgtataaattttagaaataacattagcgaattgttgtgcgttgatgtcgttattctgaaacagtatgattttaggtagcattttcttaacaaagagaacgtatttattgttactcagttgaacagatgatatatccagattactaacgcatctgattccgtataccaaactttcagaagaaatggtatacaattgtttgtattcattcaatgtctctttttcagaaattagtttagagtcgaatactgcaataattttcaagagatagttttcatcagataagattttatttagtgtagatatgataaaactattgttttgttggagaacttgatacgccgcgttctctgtagtcgacgctctcaaatgggaaacaatctccattatttttttggaatcggatactatatcttcggtatcttgacgcagtctagtatacatagagttaagagagattagagtttgtacattaagcaacatgtctctaaatgtggctacaaacttttcctttttcacatcatctagtttattatataccgatttcacaacggcaccagatttaaggaaccagaatgaaaaactctgataactacaatatttcatcatagttacgattttatcatcttctatagttggtgtaatagcgcatacctttttctccaagactggaaccaacgtcataaaaatgtttaaatcaaaatccatatcaacatctgatgcgctaagaccagtctcgcgttcaagattatctttactaatggtgacgaactcatcgtataaaactctaagtttgtccattatttatttacagatttagttgtttaatttatttgtgctcttccagagttgggatagtatttttctaacgtcggtattatattattaggatctacgttcatatgtatcataatattaatcatccacgttttgataaatctatctttagcttctgaaataacgtatttaaacaaaggagaaaaatatttagctacggcatcagacgcaataacattttttgtaaatgtaacgtatttagacgacagatcttcgttaaaaagttttccatctatgtagaatccatcggttgttaacaccattcccgcgtcagattgaataggagtttgaatagtttgttttggaaatagatccttcaataacttatagttgggtgggaaaaaatcgattttatcactagactctttcttttttactatcattacctcatgaactatttcttgaatgagtatatgtattttctttcctatatcggacgcgttcattggaaaatataccatgtcgttaactataagaatatttttatcctcgtttacaaactgaataatatcagatgtagttcgtaaacgaactatatcatcaccagcacaacatctaactatatgatatccactagtttcctttagccgtttattatcttgttccatattagcagtcattccatcatttaagaaggcgtcaaaaataatagggagaaatgacattttggattctgttacaactttaccaaaattaaggatatacggacttactatctttttctcaacgtcaatttgatgaacacacgatgaaaatgtgcttctatgagattgatcatgtagaaaacaacaagggatacaatatttccgcatatcatgaaatatattaagaaatcccaccttattatatttccccaaaggatccatgcacgtaaacattatgccgttatcattaataaagacttctttctcatcggatctgtaaaagttgttactgatttttttcattccaggatctagataattaataatgatgggttttctattcttattctttgtattttggcatatcctagaccagtaaacagtttccactttggtaaaatcagcagacttttgaacgctattaaacatggcattaatggcaataactaaaaatgtaaaatatttttctatgttaggaatatggtttttcactttaatagatatatggtttttggccaaaatgatagatatttttttatccgaggatagtaaaatattattagtcgccgtctctataaaaatgaagctagtctcgatatccaattttattctagaattgataggagtcgccaaatgtaccttatacgttatatctcccttgatgcgttccatttgtgtatctatatcggacacaagatctgtaaatagttttacgttattaatcatcacggtatcgccgtcgctagataacgctaatgtaccatccaagtcccaaatggagagatttaactgttcatcgtttagaataaaatgattaccggtcatattaataaagtgttcatcgtatctagataacaacgacttataattaatgtccaagtcttgaactcgctgaatgatcttttttaacccagttagttttagattggtacgaaatatattgttaaactttgattctacagtaatgtccaaatctagttgtggaaatacttccatcaacattgtttcaaacttgataatattattatctacatcttcgtacgatccaaattccggaatagatgtatcgcacgctctggccacccagataaccaaaaagtcacacgctccaggatatacattgtataaaaagctatcgttttttagtagggtttttttctgcgtgtatacgaagggattaaaaatagtattatcaacgtaactatattccaaattattcttatgagaatagataataatatcgtccttaatatctaacaaatttcctaaatatccctttaattgagtcattcgaagcgtcaatagaatatgtctcttaactatttccggctgttgtatatttaaatgacttcgtaaaaaataatatatgggcgacttctcatctatgtaatcatatggagtgagatatagggctcgttctacctcctgccccttacccacctgtaataccaattgcggacttactatatatcgcatatttatatcgtggggtaaagtgaaaatctactaccgatgatgtaagtcttacaatgttcgaaccagtaccagatcttaatttggaggcctccgtagaactaggggaggtaaatatagatcaaacaacacctatgataaaggagaatagcggttttatatcccgcagtagacgtctattcgcccatagatctaaggatgatgagagaaaactagcactacgattctttttacaaagactttattttttagatcatagagagattcattatttgttcagatgcgttgacgctgtaaaagacgtcactattaccaaaaaaaataacattatcgtggcgccttatatagcacttttaactatcgcatcaaaaggatgcaaacttacagaaacaatgattgaagcattctttccagaactatataatgaacatagtaagaaatttaaattcaactctcaagtatccatcatccaagaaaaactcggataccagtttggaaactatcacgtttatgattttgaaccgtattactctacagtagctctggctattcgagatgaacattcatctggcatttttaatatccgtcaagagagttatctggtaagttcattatctgaaataacatatagattttatctaattaatctaaaatctgatcttgttcaatggagtgctagtacgggcgctgtaattaatcaaatggtaaatactgtattgattacagtgtatgaaaagttacaactggtcatagaaaatgattcacaatttacatgttcattggctgtggaatcaaaacttccaataaaattacttaaagatagaaatgaattatttacaaaattcattaacgagttaaaaaagaccagttcattcaagataagcaaacgcgataaggatacgctactaaaatattttacttaggactggagttagaatttatagacgactcatttcgtttatcattgttactattattactattactatcattattagtgttggcattattagtattcttcttgtcatcttgttcagaaatatacagcaatgctatacctaatactaaatacattatcatgctcgcaatggctctaacaacaacgaaccaaaatgaatttggtcgtagcttttgttcacaaaaatacataaagaaatgtctacataaatctatggcgccattggctacttgaaatagcgccagtcctcctacagattttaatatagctgtataacatgacatttattcatcatcaaaagagacagagtcaccatctgtcatatttagattttttttcatgtgttcaaagtatcctctactcatttcattataatagtttatcatacttagaattttaggacggatcaatgagtaagacttgactagatcgtcagtagtaatttgtgcatcgtctattctgcatccgcttcgtcgaataatgtatagcatcgctttgagattctccatagctatcaagtctttatacaatgacatggaaatatctgtgaatactttatacttctccaacatcgatgccttaacatcatcgcctactttagcattgaaaatacgttctattgtgtagatggatgtagcaagatttttaaacaacaatgccatcttacacgatgattgcctcaagtctccaatcgtttgtttagaacgattagctacagagtccaatgcttggctgactagcatattattatctttagaaattgtattcttcaatgaggcgtttatcatatctgtgatttcgttagtcatattacagtctgactgggttgtaatgttatccaacatatcacctatggatacggtacacgtaccagcatttgtaataatcctatctaagatgttgtatggcattgcgcagaaaatatcttctcctgtaatatctccactctcgataaatctactcagattattcttaaatgccttattctctggagaaaagatatcagtgtccatcatttcattaatagtatacgcagaaaagataccacgagtatcaattctatccaagatacttatcggttccgagtcacagataatggtttcctctccttcgggagatcctgcatagaaatatctaggacaatagtttctatactgtctgtaactctgataatctctaaagtcactaactgataccatgaaattgagaagatcaaacgctgaagtaattaatttttctgcctcgtttttactacaactagttttcatcaatgtagtgacgatgtattgtttagttacttttggtctaatactgatgatagagatattattgcttcccataatggatcttctagtagtcaccttaaagcccattgatgcgaatagcagatagataaagtcttggtatgactcctttctaatatagtacggactacctttgtcacccaactttatacccacataagccataacaacctctttaatagccgtttcatgaggtttatcagccatgagcctgagtagttggaagaatctcatgaatcccgtctcagaaagtcctatatgcatgatagatttatctttcctgggaaactctcgtatagtcatagatgaaatactctttaaagtttctgaaataagattagtaacagtcttacctccgactactctaggtaacaaacaaactctaataggtgttttctctgcggagataatatcagaaaggatagagcaataagtagtattattgtgattataaagaccgaatacataacaggtagaatttataaacatcatgtcctgaaggtttttagacttgtattcctcgtaatccataccgtcccaaaacatggatttggtaactttgatagccgtagatctttgttccttcgccaacaggttaaagaaattaataaagaatttgttgtttctatttatgtccacaaattgcacgtttggaagcgccacggttacattcactgcagcattttgaggatcgcgagtatgaagtacgatgttattgtttactggtatatctggaaagaaatctaccagtctaggaataagagattgatatcgcatagaaatagtaaagtttataatctcatcatcgaagagcattttgttaccattgtaataaatatccactctgtcatatgtataaatgaagtactgttcaaacatgatgagatgtttatatgttggcatagtagtgagatcgacgtttggtaatggcaatgtattaagattaactccataatgtctagcagcatctgcgatgttataagcgtcgtcaaagcggggtcgatcttgtattgttatatattgtctaacacctataagattatcaaaatcttgtctgcttaatacaccgttaacaatttttgccttgaattcttttattggtgcattaataacatccttatagaggatgttaaacaaataagtgttatcaaagttaagatctggatatttcttttctgctagaacatccattgagtcggagccatctggtttaatataaccaccgataaatctagctctgtattctgtatccgtcaatctaatattaagaaggtgttgagtgaaaggtggaagatcgtaaaagctgtgagtattaatgataggattagtttccgaactaatgttaattggggtattaataatatctatatttccagcgttaagtgtaacattaaacagttttaattcacgtgacgtggtatcaattaaataattaatgcccaatttggatatagcagcctgaagctcatcttgtttagttacggatcctaatgagttattaagcaatatatcgaacggatgaacgaaggttgttttaagttggtcacatactttgtaatctagacatagatgcggaagaacggtagaaactatacgaaataaatattcagagtcctctaattgatcaagagtaactattgacttaataggcatcatttatttagtattaaatgacgaccgtaccagtgacggatatacaaaacgatttaattacagagttttcagaagataattatccatctaacaaaaattatgaaataactcttcgtcaaatgtctattctaactcacgttaacaacgtggtagatagagaacataatgccgccgtagtgtcatctccagaggaaatatcctcacaacttaatgaagatctatttccagatgatgattcaccggccactattatcgaacgagtacaacctcatactactattattgacgatactccacctcctacgtttcgtagagagttattaatatcggaacaacgtcaacaacgagaaaaaagatttaatattacagtatcgaaaaatgctgaagcaataatggaatctagatctatgataacttctatgccaacacaaacaccatccttgggagtagtttatgataaagataaaagaattcagatgttagaggatgaagtggttaatcttagaaatcaacgatctaatacaaaatcatctgataatttagataattttaccaaaatactatttggtaagactccgtacaaatcaacagaagttaataagcgtatagccatcgttaattatgcaaatttgaacgggtcccccttatcagtcgaggacttggatgtttgttcggaggatgaaatagatagaatctataaaacgattaaacaatatcacgaaagtagaaaacgaaaaattatcgtcactaacgtgattattattgtcataaacattatcgagcaggcattgctaaaactcggatttgaagaaatcaaaggactgagtaccgatatcacttcagaaattatcgatgtggagatcggagatgactgcgatgctgtagcatctaaactaggaatcggtaacagtccggttcttaatattgtattgtttatactcaagatattcgttaaacgaattaaaattatttaatttaatacattcccatatccagacaacaatcgtctggattaatctgttcctgtcgtctcataccggacgacatattaatctttttattagtgggcatctttttagatggtttctttttcccagcattaactgagtcgatacctagaagatcgtgattgatctctccgaccattccacgaacttctaattggccgtctctgacggtaccataaactattttaccagcattagtaacagcttggacaatctgaccatccatcgcattgtacgatgtagtagtaactgttgttctacgtctaggagcaccagaagtatttttggagcccttggatgttgatgtagaagaagacgaggattttgattttggtttacatgtaatacattttgaactctttgattttgtatcacatgcgccggcagtcacatctgtttgagaattaagattattgttgcctcctttgacggctgcatctccaccgatttgcgctagtagatttttaagctgtggtgtaatcttattaactgtttcgatataatcatcgtaactgcttctaacggctaaattttttttatccgccatttagaagctaaaaatatttttatttatgcagaagatttaactagattatacaatgaactaatatgatccttttccagattatttacaaacttggtattttttggttctggaggaggcgaatttaaattcggacttggattcggattttgtaagttcttgatcttattatacatcgagtataggatggcgacagtaactgctacacaaataccgatcaaaagaagaataccaatcatttattgacaataacttcactattgatcaagtatgcaatatatcatcttttcactaaataagtagtaataatgattcaacaatgtcgagatatatggacgataataatttagttcatggaaatatcgctatgattggtgtgaatgactccgctaactctgtggggtgcgcagtgctttccccacatagaataaattagcattccgactgtgataataataccaagtataaacgccataatactcaatactttccatgtacgagtgggactggtagacttactaaagtcaataaaggcgaagatacacgaaagaatcaaaagaatgattccagcgattagcacgccggaaaaataatttccaatcataagcatcatgtccatttaactaataaaaattttaaatcgccgaatgaacaaagtggaatataaaccatataaaaacaatagtttgtactgcaaaaataatatctatttttgttttcgaagatatggtaaaattaaatagtagtacacagcatgttataactaacagcagcaacggctcgtaattacttatcatttactagacgaaaaggtggtgggatattttcttgctcaaataatacgaatatatcacccatccattttatgcgatgtttatatactctaatctttaatagatctatagacgacgggtttaccaacaatatagattttatcgattcatctaatttaaacccttccttaaacgtgaatgatctattatctggcataacgatgaccctacctgatgaatcggacaatgtactgggccatgtagaataaattatcaacgaattatcgtctacgaacatttatatcatttgttttaattttaggacgcgaataaatggatataaaatagaaaataacagatattacaaccagtgttatggccgcgcccaaccaggtaggcagttttattttatcttttactacaggttctcctggatgtacgtcaccaacggcggacgtagttctagtacaattagacgtaagttccgcttgggaattttttaacgctaaagagttaacgttaatcgtgcacccaacgtatttacatctagttcgttgaacatcttgattataatataaccattttctatctctagattcgtcagtgcactcatgtaaccaacataccctaggtcctaaatatttatctccggaattagattttggataattcgcgcaccaacaatttctatttcctttatgatcgttacaaaagacgtataatgccgtatccccaaaagtaaaataatcaggacgaataattctaataaactcagaacaatatctcgcatccatatgtttggagcaaatatcggaataagtagacatagccggtttccgttttgcacgtaaccattctaaacaattggggtttccaggatcgtttctacaaaatccagtcatgaaatcgtcacaatgttctgtcttgtaattattattaaatatttttggacagtgtttggtatttgtcttagaacaacattttgccacgctatcactatcgcccaggagataatccttttttataaaatgacatcgttgcccggatgctatataatcagtagcgtgttttaaatccttaatatattcaggagttacctcgttctgataatagattaatgatccaggacgaaatttgaaagaactacatggttctccatgaattaatacatattgtttagcaaattcaggaactataaaactactacaatgatctatcgacataccatctatcaaacaaaacttgggtttaatttctcccggagatgtttcataatagtacgtataactttcttctgcaaacttaacagctctattatattcaggataattaaaacctaattccatatatttgtctcgtatatctgctattcctggtgctattttgattctattaagagtaacagctgcccccattcttaataatcgtcagtatttaaactgttaaatgttggtatatcaacatctaccttatttcccgcagtataaggtttgttgcaggtatactgttcaggaatggttacatttatacttcttctatagtcctgtctttcgatgttcatcacatatgcaaagaacagaataaacaaaataatgtaagaaataatattaaatatctgtgaattcgtaaatacattgattgccataataattacagcagctacaatacacacaatagacattcccacagtgttgccattacctccacgatacatttgagttactaagcaataggtaataactaagctagtaagaggcaatagaaaagatgagataaatatcatcaatatagagattagaggagggctatatagagccaagacgaacaaaatcaaaccgagtaacgttctaacatcattatttttgaagattcccaaataatcattcattcctccataatcgttttgcatcatacctccatctttaggcataaacgattgctgctgttcctctgtaaataaatctttatcaagcactccagcacccgcagagaagtcgtcaagcatattgtaatatcttaaataactcatttatatattaaaaaatgtcactattaaagatggagtataatctttatgccgaactaaaaaaaatgacttgtggtcaacccctaagtctttttaacgaagacggggatttcgtagaagttgaaccgggatcatcctttaagtttctgatacctaagggattttacgcctctccttccgtaaagacgagtctagtattcgagacattaacaacgaccgataataaaatcactagtatcaatccaacaaatgcgccaaagttatatcctcttcaacgcaaagtcgtatctgaagtagtttctaatatgaggaaaatgatcgaatcaaaacgtcctctatacatcactcttcacttggcgtgtggatttggtaagactattaccacgtgttatcttatggctacacacggtagaaaaaccgtcatttgcgtacccaataaaatgttaatacatcaatggaagacacaggtagaggcagtcggattggaacataagatatccatagatggagtaagtagtctattaaaggaactaaagactcaaagtccggatgtattaatagtagtcagtagacatctgacaaacgatgccttttgtaaatatatcaataagcattatgatttgttcatcttggatgaatcacatacgtataatctgatgaacaatacagcagttacaagatttttagcgtattatcctccgatgatgtgttattttttaactgctacacctagaccatctaaccgaatttattgtaacagtattattaatattgccaagttatccaatctaaaaaaaactatctatgcagtagatagtttttttgagccatattccacagataatattagacatatggtaaaacgactagatggaccatctaataaatatcatatatataccgagaagttattatctgtagacgagcctagaaatcaacttattcttgataccctggtagaagaattcaagtcaggaactattaatcgcattttagttattactaaactacgtgaacatatggtattattctacaaacgattattagattttttcggaccagaggttgtatttataggagacgcccaaaatagacgtactccagatatggtcaaatcaatcaaggaactaaatagatttatattcgtatccaccttattttattccggtactggtttagatattcctagtttggattcgttgttcatttgctcggcagtaatcaacaatatgcaaatagagcaattactagggagggtatgtcgagaaacagaactattagataggacggtatatgtatttcctaacacatccatcaaagaaataaagtacatgataggaaatttcatgcaacgaattattagtctgtctgtagataaactaggatttaaacaaaaaagttatcggaaacatcaagaatccgatcccacttctgcatgtacaacatcatccagagaagaacgtgtattaaatagaatatttaactcgcaaaatcgttaagaagtttaagcgacgatccgcatgctgcgcaggccagtgtattacccctcatagtattaatataatccaatgatacttttgtgatgtcggaaatcttaaccaatttagactgacaggcagaacacgtcatgcaatcatcatcgtcatcgataactgtagtcttgggcttctttttgcgactcttcattccggaacgcacattggtgctatccatttaggtagtaaaaaataagtcagaatatgccctataacacgatcgtgcaaaacctggtatatcgtctctatctttatcacaatatagtgtatcgacatttttattattattgacctcgtttatcttggaacatggaatgggaacatttttgttatcaacggccatctttgccttaattccagatgttgtaaaattataactaaacagtctatcatcgacacaaatgaaattcttgtttagacgtttgtagtttacgtatgcggctcgttcgcgtctcattttttcagatattgcaggtactataatattaaaaataagaatgaaataacataggattaaaaataaagttatcatgacttctagcgctgatttaactaacttaaaagaattacttagtctgtacaaaagtttgagattttcagattctgcggctatagaaaagtataattctttggtagaatggggaacatctacttactggaaaataggcgtgcaaaaggtagctaatgtcgagacgtcaatatctgattattatgatgaggtaaaaaataaaccgtttaatattgatccgggctattacattttcttaccggtatattttgggagcgtctttatttattcgaagggtaaaaatatggtagaacttggatctggaaactcttttcaaataccagatgatatgcgaagtgcgtgtaacaaagtattagacagcgataacggaatagactttctgagatttgttttgttaaacaatagatggataatggaagatgctatatcaaaatatcagtctccagttaatatatttaaactagctagtgagtacggattaaacatacccaaatatttagaaattgaaatagaggaagacacattatttgacgacgagttatactctattatagaacgctctttcgatgataaatttccaaaaatatccatatcgtatattaagttgggagaacttagacggcaagttgtagactttttcaaattctcattcatgtatattgagtccatcaaggtagatcgtataggagataatatttttattcctagcgttataacaaaatcaggaaaaaagatattagtaaaagatgtagaccatttaatacgatccaaggttagagaacatacatttgtaaaagtaaaaaagaaaaacacattttccattttatacgactatgatggaaacggaacagaaactagaggagaagtaataaaacgaattatagacactataggacgagactattatgttaacggaaagtatttctctaaggttggtagtgcaggcttaaagcaattgactaataaattagatattaatgagtgcgcaactgtcgatgagttagttgatgagattaataaatccggaactgtaaaacgaaaaataaaaaaccaatcagcatttgatttaagcagagaatgtttgggatatccagaagcggattttataacgttagttaataacatgcggttcaaaatagaaaattgtaaggttgtaaatttcaatattgaaaatactaattgtttaaataacccgagtattgaaactatatatggaaactttaaccagttcgtctcaatctttaatgtcgtcaccgatgtcaaaaaaagattattcgagtgaaataatatgcgcctttgatataggtgcaaaaaatcctgccagaactgttttagaagtcaaggataactccgttagggtattggatatatcaaaattagactggagttctgattgggaaaggcgcatagctaaagatttgtcacaatatgaatacactacagttcttctagaacgtcagcctagaaggtcgccgtatgttaaatttatctattttattaaaggctttttatatcatacatcggctgccaaagttatttgcgtctcgcctgtcatgtctggtaattcatatagagatcgaaaaaagagatcggtcgaagcatttcttgattggatggacacattcggattgcgagactccgttccggatagacgcaaattagacgatgtagcggatagtttcaatttggctatgagatacgtattagataaatggaatactaattatacaccttataataggtgtaaatctagaaattacataaaaaaaatgtaataacgttagtaacgccattatggataatctatttacctttctacatgaaatagaagatagatatgccagaactatttttaactttcatctaataagttgcgatgaaataggagatatatatggtcttatgaaagaacgcatttcctcagaggatatgtttgataatatagtgtataataaagatatacatcctgccattaagaaactagtgtattgcgacatccaacttactaaacacattattaatcagaatacgtatccggtatttaacgattcttcacaagtgaaatgttgtcattatttcgacataaactcagataatagcaatattagctctcgtacagtagagatatttgagagggaaaagtcatctcttgtatcatatattaaaactaccaataagaagagaaaggtcaattacggcgaaataaagaaaactgttcatggaggcactaatgcaaattacttttccggtaaaaagtctgacgagtatctgagtactacagttagatccaacattaatcaaccttggatcaaaaccatctctaagaggatgagagttgatatcattaatcactctatagtaacgcgtggaaaaagctctatattacaaactatagaaattatttttactaatagaacatgtgtgaaaatattcaaggattctactatgcacattattctatccaaggacaaggatgaaaaggggtgtatacacatgattgacaaattattctatgtctattataatttatttctgttgttcgaagatatcatccaaaacgagtactttaaagaagtagctaatgttgtaaaccacgtactcacggctacggcattagatgagaaattattcctaattaagaaaatggctgaacacgatgtttatggagttagcaatttcaaaatagggatgtttaacctgacatttattaagtcgttggatcataccgttttcccctctctgttagatgaggatagcaaaataaagttttttaaggggaaaaagctcaatattgtagcattacgatctctggaggattgtataaattacgtgactaaatccgagaatatgatagaaatgatgaaggaaagatcgactattttaaatagcatagatatagaaacggaatcggtagatcgtctaaaagaattgcttctaaaatgaaaaaaaacactaattcagaaatggatcaacgactagggtataagtttttggtgcctgatcctaaagccggagttttttatagaccgttacatttccaatatgtatcgtattctaattttatattgcatcgattgcatgaaatcttgaccgtcaagcggccactcttatcgtttaagaataatacagaacgaattatgatagaaattagcaatgttaaagtgactcctccagattactcacctataatcgcgagtattaaaggtaagagttatgacgcattagccacgttcactgtaaatatctttaaagaggtaatgaccaaagagggtatatccatcactaaaataagtagttatgagggaaaagattctcatttgataaaaattccgctactaataggatacgggaataaaaatccacttgatacagccaagtatcttgttcctaatgtcataggtggagtctttatcaataaacaatctgtcgaaaaagtaggaattaatctagtagaaaagattacaacatggccaaaatttagggttgttaagccaaactcattcactttctcgttttcctccgtatcccctcctaatgtattaccgacaagatatcgccattacaagatatctctggatatatcacaattggaagcgttgaatatatcatcgacaaagacatttataacggtcaatattgttttgctgtctcaatatttatctagagtgagtctagaattcattagacgtagtttatcatacgatatgcctccagaagttgtctatctagtaaacgcgataatagatagtgctaaacgaattactgaatctattactgactttaatattgatacatacattaatgacctggtggaagctgaacacattaaacaaaaatctcagttaacgatcaacgagttcaaatatgaaatgctgcataactttttacctcatatgaactatacacccgatcaactaaagggattttatatgatatctttactaagaaagtttctctactgtatcttccacacttctagatatccagatagagattcgatggtttgtcatcgcatcctaacgtacggcaaatattttgagacgttggcacatgatgaattagagaattacataggcaacatccgaaacgatatcatgaacaatcacaagaacagaggcacttacgcggtaaacattcatgtactaacaactcccggacttaatcacgcgttttctagcttattgagtggaaagttcaaaaagtcagacggtagttatcgaacacatcctcactattcatggatgcagaatatttctattcctaggagtgttggattttatccggatcaagtaaagatttcaaagatgttttctgtcagaaaataccatccaagtcaatatctttacttttgttcatcagacgttccggaaagaggtcctcaggtaggtttagtatctcaattgtctgtcttgagttccattacaaatatactaacgtctgagtatttggatttggaaaagaaaatttgtgagtatatcagatcatattataaagatgatataagttactttgaaacaggatttccaatcactatagaaaatgctctagtcgcatctcttaatccaaatatgatatgtgattttgtaactgactttagacgtagaaaacggatgggattcttcggtaacttggaggtaggtattactttagttagggatcacatgaatgaaattcgcattaatattggagcgggaagattagtcagaccattcttggttgtggataacggagagctcatgatggatgtgtgtccggagttagaaagcagattagacgacatgacattctctgacattcagaaagagtttccgcatgtcatcgaaatggtagatatagaacaatttacttttagtaacgtatgtgaatcggttcaaaaatttagaatgatgtcaaaggatgaaagaaagcaatacgatttatgtgactttcctgccgaatttagagatggatatgtagcatcttcattagtgggaatcaatcacaattctggacccagagctattcttggatgtgctcaagctaaacaagctatctcttgtctgagctcggatatacgaaataaaatagacaatggaattcatttgatgtatccagagaggccaatcgtgattagtaaggctttagaaacttcaaagattgcggctaattgcttcggccaacatgttactatagcattaatgtcgtacaaaggtatcaatcaagaggatggaattatcatcaaaaaacaatttattcagagaggcggtctcgatattgttacagccaagaaacatcaagtagaaattccattggaaaactttaataacaaagaaagagataggtctaacgcctattcaaaattagaaagtaatggattagttagactgaatgctttcttggaatccggagacgctatggcacgaaatatctcatcaagaactcttgaagatgattttgctagagataatcagattagcttcgatgtttccgagaaatataccgatatgtacaaatctcgcgttgaacgagtacaagtagaacttactgacaaagttaaggtacgagtattaaccatgaaagaaagaagacccattctaggagacaaatttaccactagaacgagtcaaaagggaacagtcgcgtatgtcgcggatgaaacggaacttccatacgacgaaaatggtatcacaccagatgtcattattaattctacatccatcttctctagaaaaactatatctatgttgatagaagttattttaacagccgcatattctgctaagccgtacaacaataagggagaaaaccgacctgtctgttttcctagtagtaacgaaacatccatcgatacatatatgcaattcgctaaacaatgttatgagcattcaaatccgaaattgtccgatgaagaattatcggataaaatcttttgtgaaaagattctctatgatcctgaaacggataagccttatgcatccaaagtattttttggaccaatttattacttgcgtctgaggcatttaactcaggacaaggcaaccgttagatgtagaggtaaaaagacgaagctcattagacaggcgaatgagggacgaaaacgtggaggaggtatcaagttcggagaaatggagagagactgtttaatagcgcatggtgcagccaatactattacagaagttttgaaagattcggaagaagattatcaagatgtgtatgtttgtgaaaattgtggagacatagcagcacaaatcaagggtattaatacatgtcttagatgttcaaaacttaatctctctcctctcttaacaaaaattgataccacgcacgtatctaaagtatttcttactcaaatgaacgccagaggcgtaaaagtcaaattagatttcgaacgaaggcctccttcgttttataaaccattagataaagttgatctcaagccgtcttttctggtgtaatattctagtttggtagtagatacatatcaatatcatcaaattcgagatccgaattataaaatgggcgtggattgttaactatagaatcggacgtctgatattcgaaaatctgtggagtttcaggttttggtggaggtgtaactgctacttgggatactgaagtctgatattcagaaagctgtggatgttctggttcggcatccaccgatggtgtcacatcactaatcggttcggtaacgtctgtggatggaggtgctacttctacagaacctgtagcctcagttgtcaacggagatacatttttaatgcgagaaaatgtataatttggtaatggtttcttatgtggatctgaagaagaggtaagatatctactagaaagataccgatcacgttctagttctcttttgtagaacttaactttttctttctccgcatctagttgatattccaacctcttcacgttactacgttcagattccaattcacgttcgcatgggttacctccgcagtttttacgagcgatttcacgttcagccttcatgcgtctctccctctctctatcgagtttatcagagcagtctttctgaaggcgatcgaactccataaatttctccaacgctttgattgtttccatagatttccgaagttcagcttttaggactgtgattctttttctttcgaattcacagctggatgtacaaccgtttccattaccgccatctctaagtttcttttctagatcggcaacatttcatccccatgccttttacattcctcgagtctactgtcgtcgaaatatcgttccagctccttttcgacatcaataactttagcacgttgtctctcaagctctcttttgtagttatctgattccctggcacgtttaagatcttcatgcaattgagtcagctcttaacttcctctcttgcttcttcgtcatagtacgcgcaatcactgtgagatccattgttaccacgtctacactcggcgagctcgcgtttaagagattcaatttcccgtttgtattggtccatgtttccattgctaccaccattagatttacaggctgctagttgtcgttcgagatcagaaatacgggttttcttggaattgatttcgtcgatgtacttggcatcgaaacacttattaagttctttttccaattctacgattttatttctttcgcgagtcaattccctcctgtagtaactatctgttttgtcagattcacgctctctacgtagactttcttgcaagttactaatttgttccctagcacgtccgagtttagttttatatgctgaatagagttctgattcatcctttgagcagatctctagcgatcgtttaagattcctaattctagtctttagcctatttacctcctcagaagatgttccgttaccgttgcgtttacactcgttaagctgtctatcaagatccatgattctatctctaagacgttgcatctctctttccatatcagcattgctttcattattacgtctgcagtcactcaactgtctttcaatatctgagattctatctctaagacgtcgcatctctctctgtttcggcattggtttcattattacgtttacagtcgttcaactgtctttcaagatctgatattctagattggagtctgctaatctctgtagcattttcacggcattcactcagttgtctttcaagatctgaaattttagattggagtctgctaatctctgtaagatttcctcctccgctctcgatgcagtcggtcaacttattctctagttctctaatacgcgaacgcagtgcatcaacttcttgcgtgtcttcctggttgcgtgtacattcatcgagatctctaacgcgtcgtcgttcttcctcaagttctctgcgtactacagaaagcgtgtccctatcttgttgatatttagcaatttctgattctagagtactgattttgcttacgtagttactaatagttgtcttggccttatcaagatcctccttgtatttgtcgcattccttgatatccctacgaagtctggacagttcccattcgacattacgacgtttatcgatttcagctcggagatcgtcatcgcgttgttttagccacatacgactgagttcaagttctcgttgacaagatccatctacttttccattcctaatagtatccagttccttttctagttctgaacgcatttctcgttccctatcaagcgattctctcaattctcggatagtcttcttatcaatttctaataaatctgaaccatcatctgtcccattttgaatatccctgtgttctttgatctcttttgtaagtcggtcgattctttcggttttataaacagaatccctttccaaagtcctaatcttactgagtttatcactaagttctgcattcaattcggtgagttttctcttggcttcttccaactctgttttaaactctccactatttccgcattcttcctcgcatttatctaaccattcaattagtttattaataactagttggtaatcagcgattcctatagccgttcttgtaattgtgggaacataattaggatcttctaatggattgtatggcttgatagcatcatctttatcattattagggggatggacaaccttaattggttggtcctcatctcctccagtagcgtgtggttcttcaataccagtgttagtaataggcttaggcaaatgcttgtcgtacgcgggcacttcctcatccatcaagtatttataatcgggttctacttcagaatattcttttctaagagacgcgacttcgggagttagtagaagaactctgtttctgtatctatcaacgctggaatcaatactcaagttaaggatagcgaatacctcatcgtcatcatccgtatcttctgaaacaccatcatatgacatttcatgaagtctaacgtattgataaatagaatcagatttagtattaaacagatccttaacctttttagtaaacgcatatgtatattttagatctccagatttcataatatgatcacatgccttaaatgtcagtgcttccatgatataatctggaacactaatgggtgacgaaaaagatacagcaccatatgctacgttgataaataaatctgaaccactaagtagataatgattaatgttaagaaagaggaaatattcagtgtataggtatgtcttggcgtcatatcttgtactaaacacgctaaacagtttgttaatgtgatcaatttccaatagattaattagagcagcgggaataccaacaaacatattaccacatccgtattttctatgaatatcacatatcatgttaaaaaatcttgatagaagagcgaatatctcgtctgacttaatgagtcgtagttcagcagcaacataagtcataactgtaaatagaacatactttcctgtagtgttgattctagactccacatcaacaccattattaaaaatagttttatatacatctttaatctgctctccgttaatcgtcgaacgttctagtatacggaaacactttgatttcttatctgtagttaatgacttagtgatatcacgaagaatattacgaattacatttcttgtttttcttgagagacctgattcagaactcaactcatcgttccatagtttttctacctcagtggcgaaatctttggagtgcttggtacatttttcaataaggttcgtgacctccatttattataaaaaatttattcaaaacttaactacaatcgggtaattataagatcgtagatctcccatgtggcggaatactaccatctatcgcatgtggatggacagtaggtaatggccatgggaacagtaatgtttgcatatttatctttcttgctagtattactgcatattgtcccaatgtttcgatgtgatgttctaacctatcaactgccgctgtatcacaacaatagtgtccgatgaaattaagattatgatccaatgtgtttaatatatgattatcaagtcttatacgatccgcgtcttttttgacaggatcaggttcttctacaggaagaagtttcggcctcttatgatattcatgtctgggaaacggtggtctagggtgaggctccggtatcggagtgggttttggattataatcatcatcgtctatgacatcatcttcgacttcgatatttattttgctatcttgatgatgtcctgtatcagttgcattttcagcactcgactgaatattagcgcattcattgtctattattaccatatttctaaacccaaaatgtatgtgttgaacatcagtactatcgttgatgagtcttatagcatgaattcgcttatcgttatcgggtttatcttctgtcaccttagcaattccttttttattaaactctacataatcatatccatttctattgtttgttctaatataaacgagtatagcatcattgctaaatttttcaatagtatcaaaaacagaatatcctaaaccatataatatatattcaggaacactcaaactaaatgtccaggattctcctaaatacgtaaactttaatagtgcgaaatcattcaaaaatctaccacttatagatagatagtacataaatgcgtatagtagtctacctatctctttattatgaaaaccggcattacgatcatatatgtcgtgatatacctgtgatccgtttacgttaaaccataaatacatgggtgatcctataaacatgaatttatttctaattctcagagctatagttaattgaccgtgtaatatttgcttacatgcatacttgatacgcttattaataagatttttatcattgctcgttatttcagaatcgtatatataaggagtaccatcgtgattcttaccagatattatacaaaatactatatataaaatatattgacccacgttagtaatcatataaatgtttaacgttttaaattttgtattcaatgatccattatcatacgctatcatggtcttgtaatattcattctttaaaatataatattgtgttagccattgcattggagctcctaatggagattttctattctcatccattttaggataggctttcataaagtccctaataacttcgtgaataatgtttctatgttttctactgatgcatgtatttgcttcgatttttttatcccatgtttcatctatcatagatttaaacgcagtaatgctcgcaacattaacatcttgaaccgttggtacaattccgttccataaatttataatgttcgccatttatataactcattttttgaatatacttttaattaacaaaagagttaagttactcatatggacgccgtccagtctgaacatcaatctttttagccagagatatcatagccgctcttagagtttcagcgtgattttccaacctaaatagaacttcatcgttgcgtttacaacacttttctatttgttcaaactttgttgttacattagtaatctttttttccaaattagttagccgttgtttgagagtttcctcattgtcgtcttcatcggctttaacaattgcttcgcgtttagcctctggctttttagcagcctttgtagaaaaaaattcagttgctggaattgcaagatcgtcatctccggggaaaagagttccgtccatttaaagtacagattttagaaactgacactctgcgttatttatatttggtacaacacatggattataaatattgatgttaataacatcagaaaatgtaaagtctatacattgttgcatcgtgttaaattttctaatggatctagtattattgggtccaacttctgcctgaaatccaaatatggaagcggatacaaaaccgtttcctggataaaccacacatctccacttttgctttacatcagaaattgtgtcgttgacatcttgaactctcctatctaatgccggtgttccacctatagattttgaatattcgaatgctgcatgagtagcattaaattccttaatattgccataattttcatatattgagtaaccctggataaaaagtaaacacaccgcagccgtcgctaccacaataaaaaaaattgatagagagttcatttataatctattagaagctgacaaaatttttttacacgcatcagacaatgctttaataaatagttcaacatctacttttgtcatatcgaaccgatggtatgattctaacctagaattacatccgaaaaagttgactatgttcatagtcattaagtcattaacaaacaacattccagactctggattataagacgatactgtttcgtcacaattacctaccttaatcatgtgattatgaatattggctattagagcaccttctaagaaatctataatatctttgaaacacgatttaaaatcaaaccacgaatatacttctacgaagaaagttagtttacccataggagaaataactataaatggagatctaaatacaaaatccggatctatgatagttttaacattattatattctctattaaatacctccacatctaaaaatgttaattttgaaactatgtcttcgtttattaccgtacctgaactaaacgctataagctctattgtttgagaactctttaaacgatattcttgaaatacatgtaacaaagtttcctttaactcggtcggtttatctaccatagttacagaatttgtatccttatctataatataataatcaaaatcgtataaagttatataattatcgcgttcagattgtgatcttttcaaatagactaaaaaccccatttctctagtaagtatcttatgtatatgtttgtaaaatatcttcatggtgggaatatgctctaccgcagttagccattcctcattgacagcggtagatgtattagacaaaactattccaatgtttaacaagggccattttacgagattattaaatccttgtttgataaatgtagccaatgagggttcgagttcaacgacgattgaattctcttcccgcggatgctgcatgatgaacgacgggatgttgttcgattgatttggaattctttttcgactttttgtttatattaaatattttaaaatttatagcggatagcaattcatgtaccacggataatgtagacgcgtattgcgcatcgatatctttattattagataaatttatcaataaatgtgagaagtttgcctcgttaaggtcttccatttaaatattatataaacatttgtgtttgtatcttattcgtcttttatggaatagttttttactagtaaagctgcaattacacactttgtccgtaaaacataaatataaacaccagcttttatcaatcgttccaaaaagtcgacggcggacatttttaacatggcatctattttaaatacacttaggtttttggaaaaaacatcattttataattgtaacgattcaataactaaagaaaagattaagattaaacataagggaatgtcatttgtattttataagccaaagcattctaccgttgttaaatacttgtctggaggaggtatatatcatgatgatttggttgtattggggaaggtaacaattaataatctaaagatgatgctattttacatggatttatcatatcatggagtgacaagtagtggagcaatttacaaattgggatcgtctatcgatagactttctctaaataggactattgttacaaaagttaataattatgatgatacattttttgacgacgatgattgatcgctattgcacaattttgtttttgtactttctaatatagtgtttaggttctttttcatatgagaatattgatttactaaaatatctatgtttaacttttgttctatgacgtccttatcggcggtatcggtacatatacgtaattcaccttcacaaaatacggagtcttcgataataatagccaatcgattattggatctagctgtctgtatcatattcaacatgtttaatatatcctttcgtttcccctttacaggcatcgatcgtagcatattttccgcgtctgatatggaaatgttaaaactacaaaaatgcgtaatgttagcccgtcctaatattggtacgtgtctataagtttggcatagtagaataatagacgtgtttaaatgccttccaaagtttaagaattctattagagtattgcattttgatagtttatcgcctacatcatcaaaaataagtaaaaagtgtgctgattttttatgattttgtgcgacagcaatacatttttctatgttacttttagttcgtatcagattatattctagagattcctgactactaacgaaattaatatgatttggccaaatgtatccatcataatctgggttataaacgggtgtaaacaagaatatatgtttatattttttaactagtgtagaaaacagagatagtaaatagatagtttttccagatccagatcctcctgttaaaaccattctaaacggcatttttaataaattttctcttgaaaattgtttttcttggaaacaattcataattatatttacagttactaaattaatttgataataaatcaaaatatggaaaactaaggttgttagtagggaggagaacaaagaaggcacatcgtgatataaataacatttattatcatgatgacaccagaaaacgacgaagagcagacatctgtgttctccgctactgtttacggagacaaaattcagggaaagaataaacgcaaacgcgtgattggtctatgtattagaatatctatggttatttcactactatctatgattaccatgtccgcgtttctcatagtgcgcctaaatcaatgcatgtctgctaacgaggctgctattactgacgccgctgttgccgttgctgctgcatcatctactcatagaaaggttgcgtctagcactacacaatatgatcacaaagaaagctgtaatggtttatattaccagggttcttgttatatattacattcagactaccagttattctcggatgctaaagcaaattgcactgcggaatcatcaacactacccaataaatccgatgtcttgactacctggctcattgattatgttgaggatacatggggatctgatggtaatccaattacaaaaactacatccgattatcaagattctgatgtatcacaagaagttagaaagtatttttgtgttaaaacaatgaactaatatttatttttgtacattaataaatgaaatcgcttaatagacaaactgtaagtaggtttaagaagttgtcggtgccggccgctataatgatgatactctcaaccattattagtggcataggaacatttctgcattacaaagaagaactgatgcctagtgcttgcgccaatggatggatacaatacgataaacattgttatttagatactaacattaaaatgtctacagataatgcggtttatcagtgtcgtaaattacgagctagattgcctagacctgatactagacatctgagagtattgtttagtattttttataaagattattgggtaagtttaaaaaagaccaatgataaatggttagatattaataatgataaagatatagatattagtaaattaacaaattttaaacaactaaacagtacgacggatgctgaagcgtgttatatatacaagtctggaaaactggttaaaacagtatgtaaaagtactcaatctgtactatgtgttaaaaaattctacaagtgacaacaaaaaatgaattaataataagtcgttaacgtacgccgccatggacgccgcgtttgttattactccaatgggtgtgttgactataacagatacattgtatgatgatctcgatatctcaatcatggactttataggaccatacattataggtaacataaaaactgtccaaatagatgtacgggatataaaatattccgacatgcaaaaatgctactttagctataagggtaaaatagttcctcaggattctaatgatttggctagattcaacatttatagcatttgtgccgcatacagatcaaaaaataccatcatcatagcatgcgactatgatatcatgttagatatagaagataaacatcagccattttatctattcccatctattgatgtttttaacgctacaatcatagaagcgtataacctgtatacagctggagattatcatctaatcatcaatccttcagataatctgaaaatgaaattgtcgtttaattcttcattctgcatatcagacggcaatggatggatcataattgatgggaaatgcaatagtaattttttatcataaaagttgtaaagtaaataataaaacaataaatattgaactagtagtacgtatattgagcaatcagaaatgatgctggtacctcttatcacggtgaccgtagttgcgggaacaatattagtatgttatatattatatatttgtaggaaaaagatacgtactgtctataatgacaataaaattatcatgacaaaattaaaaaagataaagagttctaattccagcaaatctagtaaatcaactgatagcgaatcagactgggaggatcactgtagtgctatggaacaaaacaatgacgtagataatatttctaggaatgagatattggacgatgatagcttcgctggtagtttaatatgggataacgaatccaatgttatggcgcctagcacagaacacatttacgatagtgttgctggaagcacgctgctaataaataatgatcgtaatgaacagactatttatcagaacactacagtagtaattaatgaaacggagactgttgaagtacttaatgaagataccaaacagaatcctaactattcatccaatcctttcgtaaattataataaaaccagtatttgtagcaagtcaaatccgtttattacagaacttaacaataaatttagtgagaataatccgtttagacgagcacatagcgatgattatcttaataagcaagaacaagatcatgaacacgatgatatagaatcatcggtcgtatcattggtgtgattagtttcctttttataaaattgaagtaatatttagtattattgctgccgtcacgttgtacaaatggagatattccctgtattcggcatttctaaaattagcaattttattgctaataatgactgtagatattatatagatacagaacatcaaaaaattatatctgatgagatcaatagacagatggatgaaacggtacttcttaccaacatcttaagcgtagaagttgtaaatgacaatgagatgtaccatcttattcctcatagattatcgacgattatactctgtattagttctgtcggaggatgtgttatctctatagataatgacatcaatggcaaaaatattctaacctttcccattgatcatgctgtaatcatatccccactgagtaaatgtgtcgtagttagcaagggtcctacaaccatattggttgttaaagcggatatacctagcaaacgattggtaacatcgtttacaaacgacatactatatgtaaacaatctgtcactgattaattatttgccgttgtctgtattcattattagacgagtcaccgactatttggatagacacatatgcgatcagatatttgctaataataagtggtattcccttataaccatcgacgataagcaatatcctattccatcaaactgtataggtatgtcctctgccaagtacataaattctagcatcgagcaagatactttaatccatgtttgtaacctcgagcatccgttcgactcagtatacaaaaaaatgcagtcgtacaattctctacctatcaaggaacaaatattgtacggtagaattgataatataaatatgagcattagtatttctgtggattaatagatttctagtatggggatcattaatcatctctaatctctaaatacctcataaaacgaaaaaaaagctattatcaaatactgtacggaatggattcattctcttctctttttatgaaactctgttgtatatctactgataaaactggaagcaaaaaatctgatagaaagaataagaataagatcaaggattatatggaacacgattattataaaataacaatagttcctggttcctcttccacgtctactagctcgtggtattatacacatgcctagtaatagtctctttgcgttgacggaaagcagactagaaataacaggctaaaatgttcagacaccataatagttcccaacccagataataacagagttccatcaacacattcctttaaactcaatcccaaacccaaaaccgttaaaatgtatccggccaattgatagtagataatgaggtgtacagcgcatgataatttacacagtaaccaaaatgaaaatactttagtaattataagaaatatagacggtaatgtcatcatcaacaatccgataatatgcctgagagtaaacattgacggataaaacaaaaatgctccgcataactctatcatggcaataacacaaccaaatacttgtaagattcctaaattagtagaaaatacaacgaatatcgatgtataagtgatctcgagaaataataagaataaagtaatgcccgtaaagataaacatcaacattgtttggtaatcattaaaccaattagtatgaagttgaactaatttcacagtagattttattccagtgttatcctcgcatgtataagtacctggtaagatatctttatattccataatcaatgagacatcactatctgataacgaatgaagtctagcactagtatgccatttacttaatattgtcgtcttggaagttttattataagttaaaatatcatggttatccaatttccatctaatatactttgtcggattatctatagtacacggaataatgatggtatcattacatgctgtatactctatggtctttgtagttgttataacaaccaacgtatagaggtatatcaacgatattctaactcttgacattttttatttatttaaaatgatacctttgttatttattttattctattttgctaacggtattgaatggcataagtttgaaacgagtgaagaaataatttctacttacttattagacgacgtattatacacgggtgttaatggggcggtatacacattttcaaataataaactaaacaaaactggtttaactaataataattatataacaacatctataaaagtagaggatgcggataaggatacattagtatgcggaaccaataacggaaatcccaaatgttggaaaatagacggttcagacgacccaaaacatagaggtagaggatacgctccttatcaaaatagcaaagtaacgataatcagtcacaacggatgtgtactatctgacataaacatatcaaaagaaggaattaaacgatggagaagatttgacggaccatgtggttatgatttattcacggcggataacgtaattccaaaagatggtttacgaggagcattcgtcgataaagacggtacttatgacaaagtttacattcttttcactgatactatcggctcaaagagaattgtcaaaattccgtatatagcacaaatgtgcctaaacgacgaaggtggtccatcatcattgtctagtcatagatggtcgacgtttctcaaagtcgaattagaatgtgatatcgacggaagaagttatagacaaattattcattctagaactataaaaacagataatgatacgatactatatgtattcttcgatagtccttattccaagtccgcattatgtacctattctatgaataccattaaacaatctttttctacgtcaaaattggaaggatatacaaagcaattgccgtctccagctcctggtatatgtttaccagctggaaaagttgttccacataccacgtttgaagtcatagaacaatataatgtactagatgatattataaagcctttatctaaccaacctatcttcgaaggaccgtctggtgttaaatggttcgatataaaggagaaggaaaatgaacatcgggaatatagaatatacttcataaaagaaaattctatatattcgttcgatacaaaatctaaacaaactcgtagctcgcaagtcgatgcgcgactattttcagtaatggtaactgcgaaaccgttatttatagcagatatagggataggagtaggaatgccacaaatgaaaaaaatacttaaaatgtaatcttaatcgagtacaccacacgacaatgaacaaacataagacagattatgctggttatgcttgctgcgtaatatgcggtctaattgtcggaattatttttacagcgacactattaaaagttgtagaacgtaaattagttcatacaccattaatagataaaacgataaaagatgcatatattagagaagattgtcctactgactggataagctataataataaatgtatccatttatctactgatcgaaaaacctgggaggaaggacgtaatgcatgcaaagctctaaattcaaattcggatctaattaagatagagactccaaacgagttaagttttttaagaagccttagacgaggctattgggtaggagaatccgaaatattaaaccagacaaccccatataattttatagctaagaatgccacgaagaatggaactaaaaaacggaaatatatttgtagcacaacgaatactcccaaactgcattcgtgttacactatataacaattacactacatttttatcataccactacttcggttagatgttttagaaaaaaataaatatcgccgtaccgttcttgtttttataaaaataacaattaacaattatcaaattttttctttaatattttacgtggttgaccattcttggtggtaaaataatctcttagtgttggaatggaatgctgtttaatgtttccacactcatcgtatattttgacgtatgtagtcacatcgtttacgcaatagtcagactgtagttctatcatgcttcctacatcagaaggaggaacagttttaaagtctcttggttttaatctattaccgttagttttcatgaaatcctttgttttatccacttcacattttaaataaatgtccactatacattcttttgttaattttactagatcgtcatgggtcatagaatttataggttccgtagtccatggatccaaactagcaaacttcgcgtatacggtatcgcgattagtgtatacaccaactgtatgaaaattaagaaaacagtttaataaatcaacagaaatatttaatcctccgtttgatacagatgcgccatatttatggatttcggattcacacgttgtttgtctgaggtgttcgtctagtgttgcttctacgtaaacttcgattcccatatattctttattgtcagaatcgcataccgatttatcatcatacactgtttgaaaactaaatggtatacacatcaaaataataaataataacgagtacattctgcaatattgttatcgtaattggaaaaatagtgttcgagtgagttggattatgtgagtattggattgtatattttattttatattttgtaataagaataaaatgctaatgtcaagtttattccaatagatgtcttattaaaaacatatataataaataacaatggctgaatggcataaaattatcgaggatatctcaaaaaataataagttcgaggatgccgccatcgttgattacaagactacaaagaatgttctagctgctattcctaacagaacatttgccaagattaatccgggtgaaattattcctctcatcactaatcgtaatattctaaaacctcttattggtcagaaatattgtattgtatatactaactctctaatggatgagaacacgtatgctatggagttgcttactgggtacgcccctgtatctccgatcgttatagcgagaactcataccgcacttatatttttgatgggtaagccaacaacatccagacgtgacgtgtatagaacgtgtagagatcacgctacccgtgtacgtgcaactggtaattaaaataaaaagtaatattcatatgtagtgtcaattttaaatgatgatgatgaaatggataatatccatattgacgatgtcaataatgccggtattggcatacagttcatcgatttttagatttcattcagaggatgtggaattatgttatgggcatttgtattttgataggatctataatgtagtaaatataaaatataatccgcatattccatatagatataattttattaatcgcacgttaaccgtagatgaactagacgataatgtcttttttacacatggttattttttaaaacacaaatatggttcacttaatcctagtttgattgtctcattatcaggaaacttaaaatataatgatatacaatgctcagtaaatgtatcgtgtctcattaaaaatttggcaacgagtacatctactatattaacatctaaacataagacttattctctacatcggtccacgtgtattactataataggatacgattctattatatggtataaagatataaatgacaagtataatgacatctatgattttactgcaatatgtatgctaatagcgtctacattgatagtgaccatatacgtgtttaaaaaaataaaaatgaactcttaattatgctatgctattagaaatggataaaatcaaaattacggttgattcaaaaattggtaatgttgttaccatatcgtataacttggaaaagataactattgatgtcacacctaaaaagaaaaaagaaaaggatgtattattagcgcaatcagttgctgtcgaagaggcaaaagatgtcaaggtagaagaaaaaaatattatcgatattgaagatgacgatgatatggatgtagaaagcgcgtaatacgatctataaaaataagtatataaatactttttatttactgtactcttactgtgtagtggtgataccctactcgattatttttttaaaaaaaaaatacttattctgattcttctagccatttccgtgttcgtttgaatgccacatcgacgtcaaagataggggagtagttgaaatctagttctgcattgttggtacgcacctcaaatgtagtgttggatatcttcaacgtatagttgttgagtagtgatggttttctaaatagaattctcttcatatcattcttgcacgcgtacatttttagcatccatcttggaatcctagatccttgttctattcccaatggtttcatcaatagaagattaaacatatcgtacgaacacgatggagagtaatcgtagcaaaagtaagcatttcctttaatcttagatcccggatactggatatattttgcagccaacacgtgcatccatgcagcatttcctacatatacccggctatgcaccgcgtcatcatcgactgtacgatacataatgttaccgtgttgcttacattgctcgtaaaagactttcatcaatttgtctccttctccgtaaattccagtgggtcttaggcaacaagtatacaattttgctccattcatgattacggaattattggctttcataaccagttgctcggccatacgtttactttttgcgtatacatgtcctggtgatatatcataaagggtatgctcatggccgatgaatggatcaccgtgtttattgggtcctattgcttccatgctactagtatagatcaaatacttgattcctaggtccacacaagctgccaaaatagtctgtgttccataatagtttactttcatgatttcattatcggtgtattttccaaatacatccactagagcagccgtatgaataatcagatttaccccatctagcgcttctctcaccttatcaaagtcgtttatatcacattgtatatagtttataaccttaactttcgaggttattggttgtggatcttctacaatatctatgactctgatttcttgaacatcatctgcactaattaacagttttactatatacctgcctagaaatccggcaccaccagtaaccgcgtacacggccattgctgccactcataatatcagactacttattctattttactaaataatggctgtttgtataatagaccacgataatatcagaggagttatttactttgaaccagtccatggaaaagataaagttttaggatcagttattggattaaaatccggaacgtatagtttgataattcatcgttacggagatattagtcaaggatgtgattccataggcagtccagaaatatttatcggtaacatctttgtaaacagatatggtgtagcatatgtttatttagatacagatgtaaatatatttacaattattggaaaggcgttatctatttcaaaaaatgatcagagattagcgtgtggagttattggtatttcttacataaatgaaaagataatacattttcttacaattaacgagaatggcgtttgatatatcagttaatgcgtctaaaacaataaatgcattagtttacttttctactcagcaaaataaattagtcatacgtaatgaagttaatgatacacactacactgtcgaatttgatagggacaaagtagttgacacgtttatttcatataatagacataatgacaccatagagataagaggggtgcttccagaggaaactaatattggttgcgcggttagtatgacttacttgtataataagtatagttttaaactgattttagcagaatatataagacacagaaatactatatccggcaatatttattcggcattgatgacactagatgatttggctattaaacagtatggagacattgatctattatttaatgagaaacttaaagtagactccgattcgggactatttgactttgtcaactttgtaaaggatatgatatgttgtgattctagaatagtagtagctctatctagtctagtatctaaacattgggaattgacaaataaaaaatataggtgtatggcattagccgaacatatatctgatagtattccaatatctgagctatctagactacgatacaatctatgtaagtatctacgcggacacactgagagcatagaggataaatttgattattttgaagacgatgattcgtctacatgttctgccgtaaccgacagggaaacggatgtataattttttttatagcgtgaaggatatgataaaaaatataattgttgtatttatcccattccaatcaccttatatgattctgtaacacaataaaggagtcttatagatgtatagaggtcagatactggtttgataaactgtttattccacataagtatgtttgactttatggttagacccgcatactttaacaaatcactgaaaattggagttaggtattgacctctcagaatcagttgccgttctggaacattaaatgtattttttatgatatactccaacgcatttatgtgggcatacaacaagtcattactaatggaatattccaagagttttagttgtctagtatttaacaagagaagagatttcaacagactgtttatgaactcgaatgccgcctcattgtcgcttatattgatgatgtcgaattctcccaatatcatcaccgatgagtagctcatcttgttatcgggatccaagttttctaaagatgtcattaaaccctcgatcatgaatggatttatcatcatcgtttttatgttggacatgagcttagtccgtttgtccacatctatagaagatgatttctgaattatttcatatatctctctctttaactccaggaacttgtcaggatggtctactttaatatgttctcgtctaagagatgaaaatctttggatggttgcacgcgacttttctctaaaggatgacgttgcccaagatcctctcttaaatgaatccatcttatccttggacaagatggacagtctattttccttagatggtttaatatttttgttacccatgatctataaaggtagacctaatcgtctcggatgaccatatatttattttcagttttattatacgcataaattgtaaaaaatatgttaggtttacgaaaatgtctcgtggggcattaatcgtttttgaaggattggacaaatctggaaaaacaacacaatgtatgaacatcatggaatcaataccttcaaacacaataaaataccttaactttcctcagagatccactgtcactggaaagatgatagatgactatctaactcgtaaaaaaacctataatgatcatatagttaatctattattttgtgcaaatagatgggagtttgcatcttttatacaagaacaactagaacagggaattactttaatagttgatagatacgcattttctggagtagcgtatgccgccgctaaaggcgcgtcaatgactctcagtaagagttatgaatctggattgcctaaacccgacttagttatattcttggaatctggtagcaaagaaattaatagaaacgtcggtgaggaaatttatgaagatgttacattccaacaaaaggtattacaagaatataaaaaaatgattgaagaaggagatattcattggcaaattatttcttctgaattcgaggaagatgtaaagaaggagttgattaagaatatagttatagaggctatacacacggttactggaccagtggggcaactgtggatgtaatagtgaaattacattttttataaatagatgttagtacagtgttataaatggatgaagcatattactctggcaacttggaatcagtactcggatacgtgtccgatatgcataccgaactcgcatcaatatctcaattagttattgccaagatagaaactatagataatgatatattaaacaaggacattgtaaattttatcatgtgtagatcaaacttggataatccatttatctctttcctagatactgtatatactattatagatcaagagaactatcagactgagttgattaattcattagacgacaatgaaattatcgattgtatagttaataagtttatgagcttttataaggataacctagaaaatatagtagatgctatcattactctaaaatatataatgaataatccagattttaaaactacgtatgccgaagtactcggttccagaatagccgatatagatattaaacaagtgatacgtaagaatatactacaattgtctaataatatccgcgaacgatatttgtgaaaatattaaaaaaaaatactttttttattaaatgacgtcttttcgtgaatttagaaaattatgctgtgctatatatcacgcatcaggatataaagaaaaatctaaattaattagagactttataacagatagggatgataaatatttgatcattaagctattgcttcccggattagacgatagaatttataacatgaacgataaacaaattataaaattatatagtataatatttaaacaatctcaggaagatatgctacaagatttaggatacggatatataggagacactattaggactttcttcaaagagaacacagaaatccgtccacgagataaaagcattttaactttagaagaagtggatagttttttaactacgttatcatccgtaactaaagaatcgcatcaaataaaattattgactgatgtagcatctgtttgtacatgtaatgatttaaaatgtgtagtcatgcttattgataaagatctaaaaattaaagcgggtcctcggtacgtacttaacgctattagtcctaatgcctatgatgtgtttagaaaatctaataacttgaaagagataatagaaaattcatctaaacaaaatctagactctatatctatttctgttatgactccaattaatcccatgttagcggaatcgtgtgattctgtcaataaggcgtttaaaaaatttccatcaggaatgtttgcggaagtcaaatacgatggtgaaagagtacaagttcataaaaataataacgagtttgccttctttagtagaaacatgaaaccagtactctctcataaagtggattatctcaaagaatacataccgaaagcatttaaaaaagctacgtctatcgtattggattctgaaattgttcttgtagacgaacataatgtaccgctcccgtttggaagtttaggtatacacaaaaagaaagaatataaaaactctaacatgtgtttgttcgtgtttgactgtttgtactttgatggattcgatatgacggacattccattgtacgaacgaagatcttttctcaaagatgttatggttgaaatacccaatagaatagtattctcagagttgacgaatattagtaacgagtctcagttaactgacgtattggatgatgcactaacgagaaaattagaaggattggtcttaaaagatattaatggagtatacgaaccgggaaagagaagatggttaaaaataaagcgagactatttgaacgagggttccatggcagattctgccgatttagtagtactaggtgcctactatggtaaaggagcaaagggtggtatcatggcagtctttctaatgggttgttacgacgatgaatccggtaaatggaagacggttaccaagtgttcaggacacgatgataatacgttaagggagttgcaagaccaattaaagatgattaaaattaacaaggatcccaaaaaaattccagagtggttagtagttaataaaatctatattcccgattttgtagtagaggatccgaaacaatctcagatatgggaaatttcaggagcagagtttacatcttccaagtcccataccgcaaatggaatatccattagatttcctagatttactaggataagagaggataaaacgtggaaagaatctactcatctaaacgatttagtaaacttgactaaatcttaatagttacatacaaactgaaaattaaaataacactatttagttggtggtcgccatggatggtgttattgtatactgtctaaacgcgctagtaaaacatggcgaggaaataaatcatataaaaaatgatttcatgattaaaccatgttgtgaaagagtttgtgaaaaagtcaagaacgttcacattggcggacaatctaaaaacaatacagtgattgcagatttgccatatatggataatgcggtatccgatgtatgcaattcactgtataaaaagaatgtatcaagaatatccagatttgctaatttgataaagatagatgacgatgacaagactcctactggtgtatataattattttaaacctaaagatgccattcctgttatcatatctataggaaaggataaagatgtctgtgaactattaatctcatcagacatatcgtgtgcatgcgtggagttaaattcatatcacgtagccattcttcccatggatgtttccttttttaccaaaggaaatgcatcattgattattctcctgtttgatttctctatcgatgcggcacctctcttaagaagtgtaaccgataataatgttattatatctagacaccagcgtctacatgacgagcttccgagttccaattggttcaagttttacataagtataaagtccgactattgttctatattatatatggttgttgatggatctgtgatgcatgcgatagctgataatagaactcacgcaattattagcaaaaatatattagacaatactacgattaacgatgagtgtagatgctgttattttgaaccacagattaggattcttgatagagatgagatgctcaatggatcatcgtgtgatatgaacagacattgtattatgatgaatttacctgatgtaggcgaatttggatctagtatgttggggaaatatgaacctgacatgattaagattgctctttcggtggctggtaatttaataagaaatcgagactacattcccgggagacgaggatatagctactacgtttacggtatagcctctagataatttttttaagcacgaaataaaaaacataattttaaaccaatctatttcatactattttgtgtgatcaccatggacataaagatagatattagtatttctggtgataaatttacggtgactactaggagggaaaatgaagaaagaaaaaaatatctacctctccaaaaagaaaaaactactgatgttatcaaacctgattatcttgagtacgatgacttgttagatagagatgagatgtttactattctagaggaatattttatgtacagaggtctattaggcctcagaataaaatatggacgactctttaacgaaattaaaaaattcgacaatgatgcggaagaacaattcggtactatagaagaactcaagcagaaacttagattaaattctgaagagggagcagataactttatagattatataaaggtacaaaaacaggatatcgtcaaacttactgtatacgattgcatatctatgataggattgtgtgcatgcgtggtagatgtttggagaaatgagaaactgttttctagatggaaatattgtttacgagcgattaaactgtttattgatgatcacatgcttgataagataaaatctatactgcagaatagactagtatatgtggaaatgtcatagaaagttaaaagttaatgagagcaaaaatatataaggttgtattccatatttgttatttttttctgtaatagttagaaaaatacattcgatggtctatctatcagattattatgtgttataaggtactttttctcataataaactagagtatgagtaagatagtgtttttcaaaacatataaatctaaaattgatggatgagatatacagctattaatttcgaaaatatattttaatctgataactttaaacatggatttttaatggtggtttaacgttttaaaaaaagattttgttattgtagtatatgataatattaaaagatggatataaagaatttgctgactgcatgtactattttttacattactacattggctacggcagatatacctacttcgtcactgccacacgctccggtaaacggggcatgtgacgagggagaatatcttgataagaggcataatcaatgttgtaatcagtgtccacctggagaatttgccaaggttagatgtaatggtaacgataacacaaaatgtgaacgctgcccacctcatacatataccgcaatccccaattactctaatggatgtcatcaatgtagaaaatgcccaacaggatcatttgataaggtaaagtgtaccggaacacagaacagtaaatgttcgtgtcttcctggttggtattgcgctactgattcttcacagactgaagattgtcgagattgtataccaaaaaggagatgtccatgcggatactttggtggaatagatgaacaaggaaatcctatttgtaaatcgtgttgtgttggtgaatattgcgactacctacgtaattatagacttgatccatttcctccatgcaaactatctaaatgtaattaattatgattttgatgataatgttaccatacattatatcgctacttggttagtgtattattcagtatgaagacctattaataattacttatcttttgacgatcttgttataattataatataaaaatacttatggcatagtaactcataattgctgacgcgataaattcgtaataatctgttttgttcaaatttttataaggaatctacaggcataaaaataaaaatataatttataatatactcttacagcgcgccatcatgaataacagcagtgaattgattgctgttattaatggatttagaaatagtggacgattttgtgatattaatatagttattaatgatgaaaggataaacgctcacagactcatcctatctggagcctccgaatatttttccattctgttttccaataattttatcgattctaatgaatacgaagttaatctaagtcatttagattatcaaagtgttaacgatttgatcgattacatttatgggatacctttgagcctaactaacgataacgtgaaatatattctttcaaccgctgattttttacaaattggatctgctattacggagtgtgaaaattacatacttaaaaatctttgttctagaaactgtatcgatttctacatatacgctgataaatataataacaagaaaatagaatcagcgtcgtttaacacaatattacaaaatattttgagactcatcaacgatgaaaactttaaatacttaacagaggaatcaatgataaaaattttaagcgatgatatgttaaatataaaaaatgaggatttcgccccactaattctcattaaatggttagagagtactcaacaaccatgcaccgtcgagttacttaaatgcctcagaatatcattgctttccccacaagttataaaatcactttatagtcatcgactggttagttcaatctacgaatgtataacattcttaaacaatatagcattcttggatgaatcatttcctagataccatagcatcgagttgatatctatcggtataagtaattcgcatgataagatttccataaactgctacaatcataaaaaaaatacatgggaaatgatatcttcacgtagatataggtgtagtttcgcagtggccgtcctggataatattatctatatgatgggtggatatgatcagtccccgtatagaagttcaaaggttatagcgtacaatacatgtacaaattcttggatatatgatataccagagctaaaatatcctcgttctaattgtgggggactggctgatgacgaatacatttattgtataggcggcatacgcgatcaggattcatcgttgacatctagtattgatagatggaagccatcaaaaccatattggcagaagtatgctaaaatgcgcgaaccaaaatgtgatatgggggttgcgatgttaaacggattaatatatgttataggtggaatcgttaaaggtgacacgtgtaccgacgcactagagagtttatcagaagatggatggatgaagcatcaacgtcttccaataaaaatgtccaatatgtcgacgattgttcatgatggcaagatttatatatctggaggttacaacaatagtagtgtagttaatgtaatatcgaatctagtccttagctataattcgatatatgatgaatggaccaaattatcatcattaaacattcctagaattaatcccgctctatggtcagcgcataataaattatatgtaggaggaggaatatctgatgatgttcgaactaatacatctgaaacatacgacaaagaaaaagattgttggacattggataatggtcacgtgttaccacgcaattatataatgtataaatgcgaaccgattaaacataaatatccattggaaaaaacacagtacacgaatgattttctaaagtatttggaaagttttataggtagttgatagaacaaaatacataattttgtaaaaataaatcactttttatactaatatgacacgattaccaatacttttgttactaatatcattagtatacgctacaccttttcctcagacatctaaaaaaataggtgatgatgcaactctatcatgtaatcgaaataatacaaatgactacgttgttatgagtgcttggtataaggagcccaattccattattcttttagctgctaaaagcgacgtcttgtattttgataattataccaaggataaaatatcttacgactctccatacgatgatctagttacaactatcacaattaaatcattgactgctagagatgccggtacttatgtatgtgcattctttatgacatcgcctacaaatgacactgataaagtagattatgaagaatactccacagagttgattgtaaatacagatagtgaatcgactatagacataatactatctggatctacacattcaccggaaactagttctgagaaacctgattatatagataattctaattgctcgtcggtattcgaaatcgcgactccggaaccaattactgataatgtagaagatcatacagacaccgtcacatacactagtgatagcattaatacagtaagtgcatcatctggagaatccacaacagacgagactccggaaccaattactgataaagaagaagatcatacagttacagacactgtctcatacactacagtaagtacatcatctggaattgtcactactaaatcaaccaccgatgatacgtacaatgataatgatacagtaccaccaactactgtaggcggtagtacaacctctattagcaattataaaaccaaggactttgtagaaatatttggtattaccgcattaattatattgtcggccgtggcaatattctgtattacgtattatatatgtaataaacgttcacgtaaatacaaaacagagaacaaagtctagatttttgacttacataaatgtctgggatagtaaaatctatcatattgagcgggccatctggtttaggaaagacagccatagccaaaagactatgggaatatatttggatttgtggtgtcccataccactagatttcctcgtcctatggaacgagaaggtgtcgattaccattacgttaacagagaggccatctggaagggaatagccgccggaaactttctagaacatactgagtttttaggaaatatttacggaacttctaaaactgctgtgaatacagcggctattaataatcgtatttgtgtgatggatctaaacatcgatggcgttagaagtcttaaaaatacgtacctaatgccttactcggtgtatataagacctacctctcttaaaatggttgagaccaagcttcgttgtagaaacactgaagcggatgatgagattcatcgtcgtgtgatgttggcaaaaactgacatggatgaggcaggtgaagccggtctattcgacactattatcattgaagatgatgtgaatttagcatatagtaagttaattcagatactacaggaccgtattagaatgtattttaacactaattagagacttaagacttaaaacttgataattaataatataactcgtttttatatgtgtctatttcaacgtctaatgtattagttaaatattaaaacttaccacgtaaaacttaaaatttaaaatgatatttcattgacagatagatcacacattatgaactttcaaggacttgtgttaactgacaattgcaaaaatcaatgggtcgttggaccattaataggaaaaggtggattcggtagtatttatactactaatgacaataattatgtagtaaaaatagagcccaaagctaacggatcattatttaccgaacaggcattttatactagagtacttaaaccatccgttatcgaagaatggaaaaaatctcacaatataaagcacgtaggtcttatcacgtgcaaggcatttggtctatacaaatccattaatgtggaatatcgattcttggtaattaatagattaggtgcagatctagatgcggtgatcagagccaataataatagactaccaaaaaggtcggtgatgttgatcggaatcgaaatcttaaataccatacaatttatgcacgagcaaggatattctcacggagatattaaagcgagtaatatagtcttagatcaaatagataagaataaattatatctagtggattacggattggtttctaaattcatgtctaatggcgaacatgttccatttataagaaatccaaataaaatggataacggtactctagaatttacacctatagattcgcataaaggatacgttgtatctagacgtggagatctagaaacacttggatattgtatgattagatggttgggaggtatcttaccatggactaagatatctgaaacaaagaattgtgcattagtaagtgccacaaaacagaaatatgttaacaatactgcgactttgttaatgaccagtttgcaatatgcacctagagaattgctgcaatatattaccatggtaaactctttgacatattttgaggaacccaattacgacaagtttcggcacatattaatgcagggtgtatattattaagtgtggtgtttggtcgataaaaattaaaaaataacttaatttattattgatctcgtgtgtacaaccgaaatcatggcgatgttttacgcacacgctctcggtgggtacgacgagaatcttcatgcctttcctggaatatcatcgactgttgccaatgatgtcaggaaatattctgttgtgtcagtttataataacaagtatgacattgtaaaagacaaatatatgtggtgttacagtcaggtgaacaagagatatattggagcactgctgcctatgtttgagtgcaatgaatatctacaaattggaaatccgatccatgatcaagaaggaaatcaaatctctatcatcacatatcgccacaaaaactactatgctctaagcggaatcgggtacgagagtctagacttgtgtttggaaggagtagggattcatcatcacgtacttgaaacaggaaacgctgtatatggaaaagttcaacatgattattctactatcaaagagaaggccaaagaaatgagtgcacttagtccaggacctatcatcgattaccacgtctggataggagattgtatctgtcaagttactgctgtggacgtacatggaaaggaaattatgaaaatgagattcaaaaagggtgcggtgcttccgatcccaaatctggtaaaagttaaacttggggagaatgatacagaaaatctttcttctactatatcggcggcaccatcgaggtaaccacctctctggaagacagcgtgaatcatgtactcatgaaacgtttggaaactatacgccatatgtggtctgttgtatatgatcattttgatattgtgaatggtaaagaatgctgttatgtgcatacgcattcatctaatcaaaatcctataccgagtactgtaaaaacaaatttgtacatgaagactatgggatcatgcattcaaatggattccatggaagctctagagtatcttagcgaactgaaggaatcaggtggatggagtcccagaccagaaatgcaggaatttgaatatccagatggagtggaagacactgaatcaattgagagattggcagaggagttcttcaatagatcagaacttcaggctggtgaatcagtcaaatttggtaattctattaattgttaaacatacatctgtttcagctaagcaactaagaacacgtatacggcagcagcttccttctatactctcatcttttaccaacacaaagggtggatatttgttcattggagttgataataatacacacaaagtatttggattcacggtgggttacgactacctcagactgatagagaatgatatagaaaagcatatcaaaagacttcgtgttgtgcatttctgtgagaagaaagaggacatcaagtacgcgtgtcgattcatcaaggtatataaacctggggatgagactacctcgacatacgtgtgcgctatcaaagtggaaagatgctgttgtgctgtgtttgcagattggccagaatcatggtatatggatactaatggtatcaagaagtattctccagatgaatgggtgtcacatataaaattttaattaatgtaactatagagaacaaataataaggttgtaatatcatatagacaataactaacaattaattagtaactgttatctcttttttaactaaccaactaactatatacctattaatacatcgtaattatagttcttaacatctattaatcattaattcgcttctttaattttttataaactaacattgttaattgaaaagggataacatgttacagaatataaattatatatggatttttttaaaaaggaaatacttgactggagtatatatttatctcttcattatatagcacgcgtgttttccaatttttccacatcccatataatacaggattataatctcgttcgaacatacgagaaagtggataaaacaatagttgattttttatctaggttgccaaatttattccatattttagaatatggggaaaatattctacatatttattctatggatgatgctaatacgaatattataattttttttctagatagagtattaaatattaataagaacgggtcatttatacacaatctcgggttatcatcatccattaatataaaagaatatgtatatcaattagttaataatgatcatccagataataggataagactaatgcttgaaaatggacgtagaacaagacattttttgtcctatatatcagatacagttaatatctatatatgtattttaataaatcatggattttatatagatgccgaagacagttacggttgtacattattacatagatgtatatatcactataagaaatcagaatcagaatcatacaatgaattaattaagatattgttaaataatggatcagatgtagataaaaaagatacgtacggaaacacaccttttatcctattatgtaaacacgatatcaacaacgtggaattgtttgagatatgtttagagaatgctaatatagactctgtagactttaatagatatacacctcttcattatgtctcatgtcgtaataaatatgattttgtaaagttattaatttctaaaggagcaaatgttaatgcgcgtaataaattcggaactactccattttattgtggaattatacacggtatctcgcttataaaactatatttggaatcagacacagagttagaaatagataatgaacatatagttcgtcatttaataatttttgatgctgttgaatctttagattatctattatccagaggagttattgatattaactatcgtactatatacaacgaaacatctatttacgacgctgtcagttataatgcgtataatacgttggtctatctattaaacaaaaatggtgattttgagacgattactactagtggatgtacatgtatttcggaagcagtcgcaaacaacaacaaaataataatggaagtactattgtctaaacgaccatctttgaaaattatgatacagtctatgatagcaattactaaacataaacagcataatgcagatttattgaaaatgtgtataaaatatactgcgtgtatgaccgattatgatactcttatagatgtacagtcgctacagcaatataaatggtatattttaagatgtttcgatgaaatagatatcatgaagagatgttatataaaaaataaaactgtattccaattagttttttgtatcaaagacattaatactttaatgagatacggtaaacatccttctttcgtgaaatgcactagtctcgacgtatacggaagtcgtgtacgtaatatcatagcatctattagatatcgtcagagattaattagtctattatccaagaagctggatcctggagataaatggtcgtgttttcctaacgaaataaaatataaaatattggaaaactttaacgataacgaactatccacatatctaaaaatcttataaacattattaaaatataaaatctaagtaggataaaatcacactacatcattgtttccttttagtgctcgacagtgtatactatttttaacgctcataaataaaaatgaaaacgatttccgttgttacgttgttatgcgtactacctgctgttgtttattcaacatgtactgtacccactatgaataacgctaaattaacgtctaccgaaacatcgtttaatgataaccagaaagttacgtttacatgtgatcagggatatcattctttggatccaaatgctgtctgtgaaacagataaatggaaatacgaaaatccatgcaaaaaaatgtgcacagtttctgattatgtctctgaactatataataaaccgctatacgaagtgaattccaccatgacactaagttgcaacggcgaaacaaaatattttcgttgcgaagaaaaaaatggaaatacttcttggaatgatactgttacgtgtcctaatgcggaatgtcaacctcttcaattagaacacggatcgtgtcaaccagttaaagaaaaatactcatttggggaatatatgactatcaactgtgatgttggatatgaggttattggtgcttcgtacataagttgtacagctaattcttggaatgttattccatcatgtcaacaaaaatgtgatatgccgtctctatctaacggattaatttccggatctacattttctatcggtggcgttatacatcttagttgtaaaagtggttttacactaacggggtctccatcatccacatgtatcgacggtaaatggaatcccatactcccaatatgtgtacgaactaacgaaaaatttgatccagtggatgatggtcccgacgatgagacagatttgagcaaactctcgaaagacgttgtacaatatgaacaagaaatagaatcgttagaagcaacttatcatataatcatagtggcgttgacaattatgggcgtcatatttttaatctccgttatagtattagtttgttcctgtgacaaaaataatgaccaatataagttccataaattgctaccgtaaatataaatccgttaaaataattaataatttaataacaaacaagtatcaaaagattaaagacttatagctagaatcaattgagatgtcttcttcagtggatgttgatatctacgatgccgttagagcatttttactcaggcactattataacaagagatttattgtgtatggaagaagtaacgccatattacataatatatacaggctatttacaagatgcgccgttataccgttcgatgatatagtacgtactatgccaaatgaatcacgtgttaaacaatgggtgatggatacacttaatggtataatgatgaatgaacgcgatgtttctgtaagcgttggcaccggaatactattcatggaaatgtttttcgattacaataaaaatagtatcaacaatcaactaatgtatgatataattaatagcgtatctataattctagctaatgagagatatagaagcgcttttaacgacgatggtatatacatccgtagaaatatgattaacaagttgtacggatacgcatctctaactactattggcacgatcgctggaggtgtttgttattatctgttgatgcatctagttagtttgtataaataattatttcaatatactagttaaaattttaagattttaaatgtataaaaaactaataacgtttttatttgtaataggtgcattagcatcctattcgaataatgagtacactccgtttaataaactgagtgtaaaactctatatagatggagtagataatatagaaaattcatatactgatgataataatgaattggtgttaaattttaaagagtacacaatttctattattacagagtcatgcgacgtcggatttgattccatagatatagatgttataaacgactataaaattattgatatgtataccattgactcgtctactattcaacgcagaggtcacacgtgtagaatatctaccaaattatcatgccattatgataagtacccttatattcacaaatatgatggtgatgagcgacaatattctattactgcagagggaaaatgctataaaggaataaaatatgaaataagtatgatcaacgatgatactctattgagaaaacatactcttaaaattggatctacttatatatttgatcgtcatggacatagtaatacatattattcaaaatatgatttttaaaaatttaaaatatattatcacttcagtgacagtagtcaaataacaaacaacaccatgagatatattataattctcgcagttttgttcattaatagtatacatgctaaaataactagttataagtttgaatccgtcaattttgattccaaaattgaatggactggggatggtctatacaatatatcccttaaaaattatggcatcaagacgtggcaaacaatgtatacaaatgtaccagaaggaacatacgacatatccgcatttccaaagaatgatttcgtatctttctgggttaaatttgaacaaggcgattataaagtggaagagtattgtacgggactatgcgtcgaagtaaaaattggaccaccgactgtaacattgactgaatacgacgaccatatcaatttgtacatcgagcatccgtatgctactagaggtagcaaaaagattcctatttacaaacgcggtgacatgtgtgatatctacttgttgtatacggctaacttcacattcggagattctaaagaaccagtaccatatgatatcgatgactacgattgcacgtctacaggttgcagcatagactttgtcacaacagaaaaagtgtgcgtgacagcacagggagccacagaagggtttctcgaaaaaattactccatggagttcgaaagtatgtctgacacctaaaaagagtgtatatacatgcgcaattagatccaaagaagatgttcccaatttcaaggacaaaatggccagagttatcaagagaaaatttaatacacagtctcaatcttatttaactaaatttctcggtagcacatcaaatgatgttaccacttttcttagcatgcttaacttgactaaatattcataactaatttttattaatgatacaaaaacgaaataaaactgcatattatacactggttaacgcccttataggctctaaccattttcaagatgaggtccctgattatagtccttctgttcccctctatcatctactccatgtctattagacgatgtgagaagactgaagaggaaacatggggattgaaaatagggttgtgtataattgccaaagatttctatcccgaaagaactgattgcagtgttcatctcccaactgcaagtgaaggattgataactgaaggcaatggattcagggatatacgaaacaccgataaattataaaaaaagcaatgtgtccgctgtttccgttaataatactattttcgtaactggcggattattcataaataactctaatagcacgatcgtggttaacaatatggaaaaacttgacatttataaagacaaacaatggtcgattatagaaatgcctatggctagggtatatcacggcattgactcgacatttggaatgttatattttgccggaggtctatccgttaccgaacaatatggtaatttagagaaaaacaacgagatatcttgttacaatcctagaacgaataagtggtttgatatttcatatactatttataagatatccatatcatcattgtgtaaactaaataacgtcttctatgtatttagtaaggacattggatatgtggaaaagtatgatggtgcatggaagttagtacatgatcgtctccccgctataaaggcattatcaacttctccttattgattgaaaatgaaaatataaatagtttttatgtatagcagtattaccctatagttttattgcttactactaacatggatacagatgttacaaatgtagaagatatcataaatgaaatagatagagagaaagaagaaatactaaaaaatgtagaaattgaaaataataaaaacattaacaagaatcatcccaatgaatatattagagaagcactcgttattaataccagtagtaatagtgattccattgataaagaagttatagaatgtatcagtcacgatgtaggaatatagatcatatctactaatttttataatcgatacaaaacataaaaaacaactcgttattacatagcaggcatggaatccttcaagtattgttttgataacgatggcaagaaatggattatcggaaatactttatattctggtaattcaatactctataaggtcagaaaaaatttcactagttcgttctacaattacgtaatgaagatagatcacaaatcacacaagccattgttgtctgaaatacgattctatatatctgtattggatcctttgactatcgacaactggacacgggaacgtggtataaagtatttggctattccagatctgtatggaattggagaaaccgatgattatatgttcttcgttataaagaattcgggaagagtattcgccccaaaggatactgaatcagtcttcgaagcatgcgtcactatgataaacacgttagagtttatacactctcgaggatttacccatggaaaaatagaaccgaggaatatactgattagaaataaacgtctttcactaattgactattctagaactaacaaactatacaagagtggaaactcacatatagattacaacgaggacatgataacttcaggaaatatcaattatatgtgtgtagacaatcatcttggagcaacagtttcaagacgaggagatttagaaatgttgggatattgcatgatagaatggttcggtggcaaacttccatggaaaaacgaaagtagtataaaagtaataaaacaaaaaaaagaatataaaaaatttatagctactttctttgaggactgttttcctgaaggaaatgaacctctggaattagttagatatatagaattagtatacacgttagattattctcaaactcctaattatgacagactacgtaaactgtttatacaagattgaaattatattcttttttttatagagtgtggtagtgttacggatatctaatattaatattagactatctctatcgcgctacacgaccaatatcgattactatggatatcttctatgaaaggagagaatgtatttatttctccagcgtcaatctcgtcagtattgacaatactgtattatggagctaatggatccactgctgaacagctatcaaaatatgtagaaacggaggagaacacggataaggttagcgctcagaatatctcattcaaatccatgaataaagtatatgggcgatattctgccgtgtttaaagattcctttttgagaaaaattggcgataagtttcaaactgttgacttcactgattgtcgcactatagatgcaatcaacaagtgtgtagatatctttactgaggggaaaatcaatccactattggatgaaccattgtctcctagcaattagtgccgtatactttaaagcaaaatggttgacgccattcgaaaaggaatttaccagtgattatcccttttacgtatctccgacggaaatggtagacgtaagtatgatgtctatgtacggcaaggcatttaatcacgcatctgtaaaagaatcattcggcaacttttcaatcatagaactgccatatgttggagatactagtatgatggtcattcttccagacaagattgatggattagaatccatagaacaaaatctaacagatacaaattttaagaaatggtgtgactttatggatgctatgtttatagatgttcacattcccaagtttaaggtaacaggctcgtataatctggtggatactctagtaaagtcaggactgacagaggtgttcggttcaactggagattatagcaatatgtgtaatttagatgtgagtgtcgacgctatgatccacaaaacgtatatagatgtcaatgaagagtatacagaagcagctgcagcaacttctgtactagtggcagactgtgcatcaacaattacaaatgagttctgtgcagatcatccgttcatctatgtgattaggcatgttgatggaaaaattcttttcgttggtagatattgctctccgacaactaattgttaaccattttttttaaaaaaaatagaaaaaacatgtggtattagtgcaggtcgttgttcttccaattgcaattggtaagatgacggccaactttagtacccacgtcttttcaccacagcactgtggatgtgacagactgaccagtattgatgacgtcaaacaatgtttgactgaatatatttattggtcgtcctatgcataccgcaacaggcaatgcgctggacaattgtattccacactcctctcttttagagatgatgcggaattagtgttcatcgacattcgcgagctggtaaaaaatatgccgtgggatgatgtcaaagattgtacagaaatcatccgttgttatataccggatgagcaaaaaaccatcagagagatttcggccatcatcggactttgtgcatatgctgctacttactggggaggtgaagaccatcccactagtaacagtctgaacgcattgtttgtgatgcttgagatgctaaattacgtggattataacatcatattccggcgtatgaattgatgagttgtacatcttgacattttctttcttctcttctccctttcttctcttctcccttcctccctcttctccctttcccagaaacaaacttttttacccactataaaataaaatgagtatactacctattatatttcttcctatatttttttattcttcattcgttcagacttttaacgcgtctgaatgtatcgacaaagggcaatattttgcatcattcatggagttagaaaacgagccagtaatcttaccatgtcctcaaataaatacgctatcatccggatataatatattagatattttatgggaaaaacgaggagcggataatgatagaattataccgatagataatggtagcaatatgctaattctgaacccgacacaatcagactctggtatttatatatgcattaccacgaacgaaacctactgtgacatgatgtcgttaaatttgacaatcgtgtctgtctcagaatcaaatatagatcttatctcgtatccacaaatagtaaatgagagatctactggcgaaatggtatgtcccaatattaatgcatttattgctagtaacgtaaacgcagatattatatggagcggacatcgacgccttagaaataagagacttaaacaacggacacctggaattattaccatagaagatgttagaaaaaatgatgctggttattatacatgtgttttagaatatatatacggtggcaaaacatataacgtaaccagaattgtaaaattagaggtacgggatagaataataccttctactatgcaattaccagatggcattgtaacttcaataggtagtaatttgactattgcatgcagagtatcgttgagacctcccacaacggacaccgacgtcttttggataagtaatggtatgtattacgaagaagatgatggggacggaaacggtagaataagtgtagcaaataaaatctatatgaccgataagagacgtgttattacatcccggttaaacattaatcctgtcaaggaagaagatgctacaacgtttacgtgtatggcgtttactattcctagcatcagcaaaacagttactgttagtataacgtgaatgtatgttgttacatttccatgtcaattgagtttataagaatttttatacattatcttccaacaaacaattgacgaacgtattgctatgattaactcccacgatactatgcatattattaatcattaacttgcagactatacctagtgctattttgacatactcgtgttcttgtgtaattgcggtatctatattattaaagtacgtaaatctagctatagttttattatttaattttagataatataccgtctccttatttttaaaaattgccacatcctttattaaatcatgaatgggaatttctatgtcatcgttagtatattgtgaacaacaagagcagatatctataggaaagggtggaatgcgatacattgatctatgtagttttaaaacacacgcgaactttgaagaatttatataaatcattccatcgatacatccttctatgttgacatgtatatatccaggaattcttttattaatgtcaggaaatgtataaactaaaacattgcccgaaagcggtgcctctatctgcgttatatccgttcttaacttacaaaatgtaaccaatacctttgcatgacttgttttgttcggcaacgttagtttaaacttgacgaatggattaattacaatagcatgatccgcgcatctattaagtttttttactttaacgcccttgtatgtttttacagagactttatctaaatttctagtgcttgtatgtgttataaatataacgggatatagaaccgaatcacctaccttagatacccaattacattttatcagatccagataataaacaaattttgtcgccctaactaattctatattgttatatattttacaattggttatgatatcatgtaataacttggagtctaacgcgcatcgtcgtacgtttatacaattgtgatttagtgtagtatatctacacatgtatttttccgcactatagtattctggactagtgataaaactatcgttatatctgtcttcaatgaactcatcgagatattgctctctgtcatattcatacacctgcataaactttctagacatcttacaatccgtgttattttaggatcatatttacatatttacgggtatatcaaagatgttagattagttaatgggaatcgtctataataatgaatattaaacaattatatgaggacttttaccacaaagcatcataaaaatgagtcgtcgtctgatttatgttttaaatatcaaccgcaaatcaactcataaaatacaagagaatgaaatatatacatattttagtcattgcaatatagaccatacttctacagaacttgattttgtagttaaaaactatgatctaaacagacgacaacctgtaactgggtatactgcactacactgctatttgtataataattactttacaaacgatgtactgaagatattattaaatcatgacgtaaatgtaacgatgaaaaccagtagcggacgtatgcctgtttatatattgcttactagatgttgtaatatttcacatgatgtagtgatagatatgatagacaaagataaaaaccacttattacatagagactattccaacctattactagagtatataaaatctcgttacatgttattgaaggaagaggatatcgatgagaacatagtatccactttattagataagggaatcgatcctaactttaaacaagacggatatacagcgttacattattattatttgtgtctcgcacacgtttataaactaggtgagtgtagaaaaccgataacgataaaaaaggccaagcgaattatttctttgtttatacaacatggagctaatctaaacgcgttagataattgtggtaatacaccattccatttgtatcttagtattgaaatgtgtaataatattcatatgactaaaatgctgttgacttttaatccgaatttcaaaatatgtaataatcatggattaacgcctatactatgttatataacttccgactacatacaacacgatattcttgttatgttaatacatcactatgaaacaaatgttggagaaatgccgatagatgagcgtcgtatgatcgtattcgagtttatcaaaacatattctacacgtccggcagattcgataacttatttgatgaataggtttaaaaatataaatatttatacccgctatgaaggaaagacattattacacgtagcatgtgaatataataatacacaagtaatagattatcttatacgtatcaacggagatataaatgcgttaaccgacaataacaaacacgctacacaactcattatagataacaaagaaaattccccatataccattaattgtttactgtatatacttagatatattgtagataagaatgtgataagatcgttggtggatcaacttccatctctacctatcttcgatataaaatcatttgagaaattcatatcctactgtatacttttagatgacacattttacgataggcacgttaagaatcgcgattctaaaacgtatcgatacgcattttcaaaatacatgtcgtttgataaatacgatggtataataactaaatgtcacgacgaaacaatgttactcaaactgtccactgttctagacactacactatatgcagttttaagatgtcataattcgagaaagttaagaagatacctcaacgagttaaaaaaatataataacgataagtcctttaaaatatattctaatattatgaatgagagataccttaatgtatattataaagatatgtacgtgtcaaaggtatatgataaactatttcctgttttcacagataaaaattgtctactaacattactaccttcagaaattatatacgaaatattatacatgctgacaattaacgatctttataatatatcgtatccacctaccaaagtatagttgtatttttctcatgcgatgtgtgtaaaaaaactgatattatataaatattttagtgccgtataataaagatgacgatgaaaatgatggtacatatatatttcgtatcattattgttattgctattccacagttacgccatagacatcgaaaatgaaatcacagaattcttcaataaaatgagagatactctaccagctaaagactctaaatggttgaatccagcatgtatgttcggaggcacaatgaatgatatagccgctctaggagagccattcagcgcaaagtgtcctcctattgaagacagtcttttatcgcacagatataaagactatgtggttaaatgggagaggctagaaaagaatagacggcgacaggtttctaataaacgtgttaaacatggtgatttatggatagccaactatacatctaaattcagtaaccgtaggtatttgtgcaccgtaactacaaagaatggtgactgtgttcagggtatagttagatctcatattaaaaaacctccttcatgcattccaaaaacatatgaactaggtactcatgataagtatggcatagacttatactgtggaattctttacgcaaaacattataataatataacttggtataaagataataaggaaattaatatcgacgacattaagtattcacaaacgggaaaggaattaattattcataatccagagttagaagatagcggaagatacgactgttacgttcattacgacgacgttagaatcaagaatgatatcgtagtatcaagatgtaaaatacttacggttataccgtcacaagaccacaggtttaaactaatactagatccgaaaatcaacgtaacgataggagaacctgccaatataacatgcactgctgtgtcaacgtcattattgatcgacgatgtactgattgaatgggaaaatccatccggatggcttataggattcgattttgatgtatactctgttttaactagtagaggcggtatcaccgaggcgaccttgtactttgaaaatgttactgaagaatatataggtaatacatataaatgtcgtggacacaactattattttgaaaaaacccttacaactacagtagtattggagtaaatatacaatgcatttttatatacattactgaattattattactgaattattattactgaattattattaattatatcgtatttgtgctatagaatggatgaagatacgcgactatctaggtatttgtatctcaccgatagagaacatataaatgtagactctattaaacagttgtgtaaaatatcagatcctaatgcatgttatagatgtggatgtacggctttacatgagtacttttataattatagatcagtcaacggaaaatacaagtatagatacaacggttactatcaatattattcatctagcgattatgaaaattataatgaatattattatgatagaactggtatgaacagtgagagtgataatatatcaatcaaaacagaatatgaattctatgatgaaacacaagatcaaagtacacaactagtaggttacgacattaaactcaaaaccaatgaggatgattttatggctatgatagatcagtgggtgtccatgattatatagatgaatcaattaataaagtagtatatggaagagagtctcacgtaagatggcgggatatatggcaagaacataatgatggcgtatacagtataggaaaggagtgcatagataatatatacgaagacaaccataccgtagacgaattctacaagatagacagcgtatcagatgtagatgacgcggaacacatatctccgataactaaaaaaccatagaatcagttgatgataatacctacatttctaatcttccgtataccatcaaatacaaaatattcgagcaacaataagtattttttatacctttaaaactgataaataaattttttctagtgatattttggcaagatgagaatcctatttctcatcgctttcatgtatgggtgtgttcactcatatgttaacgcggttgaaaccaaatgtccaaatctagacattgtaacatcttctggagaatttcattgttcaggatgtgtggaacatatgcctgagtttagctatatgtattggttggcaaaggatatgaaatcggacgaggataccaagtttatagaacatctgggtgatggcatcaaagaagatgaaaccgttcgtaccacagatagtggaatcgtcactctacgtaaagtccttcatgtgactgatactaataaatttgataattataggttcacttgtgtcctcgctacgctagatggcatttataaaaagaatgtttgctgaagtagttgtgtgctactatttttatttatgatataatctaatggaattaatttgaattgatatttatccaatactaaagattatattagaatcaaattaatcttttatacgagaaaaaataacgacatacgtcgtcaacaaattaaactttttatttattagttaactagcttatagaacttgctcattgttatgtttctaaaacgggtacggcatataggacaattatccgacgcaccggtttctcttcgtgttctatgccatatattgatgcatgttatgcaaaatatatgagtacacgaatccaataaaccaaagtatctatcgttttgagtaaacaacttcatagcaaattccacattctttttctttacttactctatacacgtcctcgtatttatttagtattttgatgatatccaactcagaaatggttgttgtattattgggtgtatttggagtataggtattattagctatgtaccaatttaccaaccctcttaatattgattgataatcacatcggttatccaattaataactaaattgtagtgtatatatagaccatatatgtttctatttttttgacagttacgtatagtttcagtaagttttgattgttgtattcctgtatctctagataagttagtcatatagtcccttccggcgatacgttttttccaagcccgaaattgattagccaaatgtgtatttatttttgtgatattgatataatatttcggataatgcatactgttagtcttatatcatttggttcatctatgtattgtaatattgttacatgatctatagatgatgtattgattttggcaggatcgaattccatatccgcgactaaacagtgaaaaaaatgtaaatactttttaaattttaaattagtaaaacttttttttattttttatgattccaaaaatactgaatacaaagtcctaaattataaatatggagatcatactaccacaacttattattatgtatacaaggccggtgtaatagatagatatatataattctattacaccggcagacaattaccgaccggtatttgtcgttaccaacataccgtataatatgtaatatacaattccataacccattgacagttgttatacatcaaaattgcaattcttttgattacgatgttataagaatgtagttaattgatgtatgatgttaatgtgtcctctttcctcttataacatcgtaatcaaaaacttttttataatatatacctaataatgtgtcttaatagttctcgtgattcgtcaaacaatcattcttataaaatataataaagcaacgtaaaaacacataaaaataagcgtaactaataagacaatggatatttacgacgataaaggtctacagactattaaactgtttaataatgaatttgattgtataaggaatgacatcagagaattatttaaacatgtaactgattccgatagtatacaacttccgatggaagacaattctgatattatagaaaatatcagaaaaatactatatagacgattaaaaaatgtagaatgtgttgacatcgataacacaataacttttatgaaatacgatccaaatgatgataataagcgtacgtgttctaattgggtacccttaactaataactatatggaatattgtctagtaatatatttggaaacaccgatatgtggaggcaaaataaaattataccaccctacaggaaatataaagtcggataaggatattatgtttgcaaagactctagactttaaatcaacgaaagtgttaactggacgtaaaacaattgccgttctagacatatccgtttcatataatagatcaatgactactattcactacaacgacgacgttgatatagatatacatactgataaaaatggaaaagagttatgttattgttatataacaatagatgatcattacttggttgatgtggaaactataggagttatagtcaatagatctggaaaatgtctgttagtaaataaccatctaggtataggtatcgttaaagataaacgtataagcgatagttttggagatgtatgtatggatacaatatttgacttttctgaagcacgagagttattttcattaactaatgatgataacaggaatatagcatgggacactgataaactagacgatgatacagatatatggactcccgtcacagaagatgattacaaatttctttctagactagtattgtatgcaaaatctcaatcggatactgtatttgactattatgttcttactggtgatacggaaccacccactgtattcattttcaaggtaactagattttactttaatatgccgaaataaaaaatttttgtataatatctagaggtagaggtattgtttagataaatacaaataacatagatacatcgcatacttagcatttttataaatatacataagacatacactttatacatttttgtaaaaatactcataaaaaaatttataaaaattatggcacaaccatatcttgtataggtagtttagttcgtcgagtgaacctataaacagataatagacaacacataataatgcctactaatacaagcataataccgggagatgggatatatgacgttgtagtgtttgggttttctgaacgttgatagtctactaatactacatgctgacatctaatgcctgtataaccatgagagcatctacaatacataccgtcaatatctctagcgtggatacagtcaccgtgtaaacaatatccatctccctctggaccgcataatctgatagctggaatatctgttgtagcgtttgtaatttctggcaatgtcgtttcgatagcgttaccactatcggcgaatgatctgattatcatagcagcgaacaacaacatcagataatttatcaacatttttgatggattctgtgtttatgctgtttctcagtgtgtgtttatgacaagattgggaattttatattattaattcagtaatataaactaataatatattgttaattgtgtaaataatataaaaataacaatacaatattgaatgtgttgctgttaaaaatgtatgtgttaatataatagaataaaataaatgagtatgatcattttagataacgattgattttatcattaccgcttcattcttatattctttgcttacggaacctatatttagaaacatctactaacaattttttatgcttgcattattaatggtatgtaatatgattgattgtgtacgcaataccaatttgttaagtatgaatacggggtacaaacataaattgaaatttaacattatttatttatgatatatatcgttatcgttaggtctataccatggatatctttaaagaactaatcttaaaacaccctgatgaaaatgttttgatttctccagtttccattttatctactttatctattctaaatcatggagcagctggttctacagctgaacaactatcaaaatatatagagaatatgaatgagaatacacccgatgacaataatgatgacatggaggtagatattccgtattgtgcgacactagctaccgcaaataaaatatacggtagcgatagtatcgagttccacgcctccttcctacaaaaaataaaagacgattttcaaactgtaaactttaataatgctaaccaaacaaaggaactaatcaacgaatgggttaagacaatgacaaatggtaaaattaattccttattgactagtccgctatccattaatactcgtatgacagttgttagcgccgtccattttaaagcaatgtggaaatatccattttctaaacatcttacatatacagacaagttttatatttctaagaatatagttaccagcgttgatatgatggtgggtaccgagaataacttgcaatatgtacatattaatgaattattcggaggattctctattatcgatattccatacgagggaaactctagtatggtaattatactaccggacgacatagaaggtatatataacatagaaaaaaatataacagatgaaaaatttaaaaaatggtgtggtatgttatctactaaaagtatagacttgtatatgccaaagtttaaagtggaaatgacagaaccgtataatctggtaccgattttagaaaatttaggacttactaatatattcggatattatgcagattttagcaagatgtgtaatgaaactatcactgtagaaaaatttctacatacgacgtttatagatgttaatgaggagtatacagaagcatcggccgttacaggagtatttacgattaacttttcgatggtatatcgtacgaaggtctacataaaccatccattcatgtacatgattaaagacaccacaggacgtatactttttatagggaaatactgctatccgcaataaatataaacaaatagacttttataaagagtcttcaacgataagtatatcgacatactacttatgctgcgaaagattctgaacgagaacgactatctcaccctcttggatcatatccgcactgctaaatactaaatctccactacactttttatcatcttatgaggaatgattgccttcgtgaaataggaataattagcaccagaatagctatggattattgtggtagagagtgcactattctatgtcgtctactggatgaagatgtgacgtacaaaaaaataaaactagaaattgaaacgtgtcacaacttatcaaaacatatagatagacgaggaaacaatgcgctacattgttacgtctccaataaatgcgatacagacattaagattgttctctcgcggagtcgagagactttgtagaaacaacgaaggattaactccgctaggagtatacagtaagcatagatacgtaaaatctcagattgtgcatctactgatatccagctattcaaattcctctaacgaactcaagtcgaatataaatgatttcgatctgtattcggataatatcgacttacgtctgctaaaatacctaattgtggataaacggatacgtccgtccaagaatacgaattatgcaatcaatggtctcggattggtggatatatacgtaacgacgcctaatccgagaccagaagtattgctatggcttcttaaatcagaatgttacagcaccggttacgtatttcgtacctgtatgtacgacagtgatatgtgtaagaactctcttcattactatatatcgtctcatagagaatctcaatctctatccaaggatgtaattaaatgtttgatcgataacaatgtttccatccatggcagagacgaaggaggatctttacccatccaatactactggtctttctcaaccatagatatagagattgttaaattattattaataaaggatgtggacacgtgtagagtatacgacgtcagccctatattagaggcgtattatctaaacaagcgatttagagtaaccccatataatgtagacatggaaatcgttaatcttcttattgagagacgtcatactcttgtcgacgtaatgcgtagtattacttcgtacgattccagagaatataaccactacatcatcgataacattctaaagagatttagacaacaggatgaatccatcgtacaagccatactgataaactacttacattacggcgatatggtcgttcgatgcatgttagataacggacaacaactatcctctacacgactactttgttaataataatctcgtcgatgtaaacgtcgtaaggtttatcgtggaaaatatggacacgcggctgtaaatcacgtatcgaacaatggccgtctatgtatgtacggtctgatattatcgagatttaataattgcgggtatcactgttatgaaaccatactgatagatgtatttgatatactaagcaagtacatggatgatatagatatgatcgataactctactatattacgcggtcgatgtcaataatatacaatttgcaaagcggttattggaatatggagcgagtatcacgctcgataatcaatacggccatccagaaaagcagttacagaagagaaaacaaaacgaaatcgttgttctacaagatgtctctccctacgacgattactacgtaaaaaagatactagcctactgcctattaagggacgagtcattcgcggaactacatagtaaattctgtttaaacgaggactataaaagtgtatttatgaaaaatatatcattcgataagatagattccatcatcgtgacataagtcgcctcaaagagattcgaatctccgacaccgacctgtatacggtatcacagctatcttaaagccatacattcagacagtcacatttcatttcccatgtacgacgatctcatagaacagtgccatctatcgatggagcgtaaaagtaaactcgtcgacaaagcactcaataaattagagtctaccatcggtcaatctagactatcgtatttgcctccggaaattatgcgcaatatcatctaaacagtatgttgtacggaaagaaccattacaaatattatccatgatagaaagaaaatatctatatgattggagaagtaggaaacaggaacaagacaacgattactacattattaaatcatgaagtccgtattatactcgtatatattgtttctctcatgtataataataaacggaagagatatagcaccgcatgcaccatccgatggaaagtgtaaagacaacgaatacaaacgccataatttgtgtccgggaacatacgcttccagattatgcgatagcaagactaacacacgatgtacgccgtgtggttcgggtaccttcacatctcgcaataatcatttacccgcttgtctaagttgtaacggaagacgcgatcgtgtaacacgactcacaatagaatctgtgaatgctctcccggatattattgtcttctcaaaggatcatccggatgcaaggcatgtgtttcccaaacaaaatgtggaataggatacggagtatccggagacgtcatctgttctccgtgtggtctcggaacatattctcacaccgtctcttccgcagataaatgcgaacccgtacccagaaatacgtttaactatatcgatgtggaaattaacctgtatccagttaacgacacgtcgtgtactcggacgaccactaccggtctcagcgaatccatctcaacgtcggaactaactattactatgaatcataaagactgtaatcccgtatttcgtgatggatacttctccgttcttaataaggtagcgacttcaggtttctttacaggagaaaggtgtgcactctgaatttcgagattaaatgcaataacaaagattcttcctccaaacagttaacgaaagcaaagaatgatactatcatgccgcattcggagacagtaactctagtgggcgacatctatatactatatagtaataccaatactcaagactacgaaactgatacaatctcttatcatgtgggtaatgttctcgatgtcgatagccatatgcccggtagttgcgatatacataaactgatcactaattccaaacccacccactttttatagtaagtttttcacccataaataataaatacaataattaatttctcgtaaaagtagaaaatatattctaatttattgcacggtaaggaagtagaatcataaagaacagtactcaatcaatagcaattatgaaacaatatatcgtcctggcatgcatgtgcctggcggcagctgctatgcctgccagtcttcagcaatcatcctcatcctcctcctcgtgtacggaagaagaaaacaaacatcatatgggaatcgatgttattatcaaagtcacaaagcaagaccaaacaccgaccaatgataagatttgccaatccgtaacggaaattacagagtccgagtcagatccagatcccgaggtggaatcagaagatgattccacatcagtcgaggatgtagatcctcctaccacttattactccatcatcggtggaggtctgagaatgaactttggattcaccaaatgtcctcagattaaatccatctcagaatccgctgatggaaacacagtgaatgctagattgtccagcgtgtccccaggacaaggtaaggactctcccgcgatcactcatgaagaagctcttgctatgatcaaagactgtgaagtgtctatcgacatcagatgtagcgaagaagagaaagacagcgacatcaagacccatccagtactcgggtctaacatctctcataagaaagtgagttacgaagatatcatcggttcaacgatcgtcgatacaaaatgcgtcaagaatctagagtttagcgttcgtatcggagacatgtgcaaggaatcatctgaacttgaggtcaaggatggattcaagtatgtcgacggatcggcatctgaaggtgcaaccgatgatacttcactcatcgattcaacaaaactcaaagcgtgtgtctgaatcgataactctattcatctgaaattggatgagtagggttaatcgaacgattcaggcacaccacgaattaaaaaagtgtaccggacactatattccggtttgcaaaacaaaaatgttcttaactacattcacaaaaagttacctctcgcgacttcttctttttctgtctcaatagtgtgatacgattatgacactattcctattcctattcctatttcctttcagagtatcacaaaaatattaaacctctttctgatggtctcataaaaaaagttttacaaaaatatttttattctctttctctctttgatggtctcataaaaaaagttttacaaaaatatttttattctctttctctctttgatggtctcataaaaaaagttttacaaaaatatttttattctctttctctctttgatggtctcataaaaaaagttttacaaaaatatttttattctctttctctctttgatggtctcataaaaaaagttttacaaaaatatttttattctctttctctctttgatggtctcataaaaaaagttttacaaaaatatttttattctctttctctctttgatggtctcataaaaaaagttttacaaaaatatttttattctctttctctctttgatggtctcataaaaaaagttttacaaaaatatttttattctctttctctctttgatggtctcataaaaaaagttttacaaaaatatttttattctctttctctctttgatggtctcataaaaaaagttttacaaaaatatttttattctctttctctctttgatggtctcataaaaaaagttttacaaaaatatttttattctctttctctctttgatggtctcataaaaaaagttttacaaaaatatttttattctctttctctctttgatggtctcataaaaaagttttacaaaaatatttttattctctttctctctttgatggtctcataaaaaagttttacaaaaatatttttattctctttctctctttgatggtctcataaaaaaagttttacaaaaatatttttattctctttctctctttgatggtctcataa

SEQ ID NO: 2 - DNA, 203057 bp, Vaccinia virus
  GLV-1h68
ttatgagaccatcaaagagagaaagagaataaaaatatttttgtaaaactttttttatgagaccatcaaagagagaaagagaataaaaatatttttgtaaaacttttttatgagaccatcaaagagagaaagagaataaaaatatttttgtaaaacttttttatgagaccatcaaagagagaaagagaataaaaatatttttgtaaaactttttttatgagaccatcaaagagagaaagagaataaaaatatttttgtaaaactttttttatgagaccatcaaagagagaaagagaataaaaatatttttgtaaaactttttttatgagaccatcaaagagagaaagagaataaaaatatttttgtaaaactttttttatgagaccatcaaagagagaaagagaataaaaatatttttgtaaaactttttttatgagaccatcaaagagagaaagagaataaaaatatttttgtaaaactttttttatgagaccatcaaagagagaaagagaataaaaatatttttgtaaaactttttttatgagaccatcaaagagagaaagagaataaaaatatttttgtaaaactttttttatgagaccatcaaagagagaaagagaataaaaatatttttgtaaaactttttttatgagaccatcaaagagagaaagagaataaaaatatttttgtaaaactttttttatgagaccatcaaagagagaaagagaataaaaatatttttgtaaaactttttttatgagaccatcaaagagagaaagagaataaaaatatttttgtaaaactttttttatgagaccatcagaaagaggtttaatatttttgtgatactctgaaaggaaataggaataggaataggaatagtgtcataatcgtatcacactattgagacagaaaaagaagaagtcgcgagaggtaactttttgtgaatgtagttaagaacatttttgttttgcaaaccggaatatagtgtccggtacacttttttaattcgtggtgtgcctgaatcgttcgattaaccctactcatccaatttcagatgaatagagttatcgattcagacacacgctttgagttttgttgaatcgatgagtgaagtatcatcggttgcaccttcagatgccgatccgtcgacatacttgaatccatccttgacctcaagttcagatgattccttgcacatgtctccgatacgaacgctaaactctagattcttgacgcattttgtatcgacgatcgttgaaccgatgatatcttcgtaactcactttcttatgagagatgttagacccgagtactggatgggtcttgatgtcgctgtctttctcttcttcgctacatctgatgtcgatagacacttcacagtctttgatcatagcaagagcttcttcatgagtgatcgcgggagagtccttaccttgtcctggggacacgctggacaatctagcattcactgtgtttccatcagcggattctgagatggatttaatctgaggacatttggtgaatccaaagttcattctcagacctccaccgatgatggagtaataagtggtaggaggatctacatcctcgactgatgtggaatcatcttctgattccacctcgggatctggatctgactcggactctgtaatttccgttacggattggcaaatcttatcattggtcggtgtttggtcttgctttgtgactttgataataacatcgattcccatatgatgtttgttttcttcttccgtacacgaggaggaggatgaggatgattgctgaagactggcaggcatagcagctgccgccaggcacatgcatgccaggacgatatattgtttcataattgctattgattgagtactgttctttatgattctacttccttaccgtgcaataaattagaatatattttctacttttacgagaaattaattattgtatttattatttatgggtgaaaaacttactataaaaagtgggtgggtttggaattagtgatcagtttatgtatatcgcaactaccgggcatatggctatcgacatcgagaacattacccacatgataagagattgtatcagtttcgtagtcttgagtattggtattactatatagtatatagatgtcgcccactagagttactgtctccgaatgcggcatgatagtatcattctttgctttcgttaactgtttggaggaagaatctttgttattgcatttaatctcgaaattcagagtgcacacctttctcctgtaaagaaacctgaagtcgctaccttattaagaacggagaagtatccatcacgaaatacgggattacagtctttatgattcatagtaatagttagttccgacgttgagatggattcgctgagaccggtagtggtcgtccgagtacacgacgtgtcgttaactggatacaggttaatttccacatcgatatagttaaacgtatttctgggtacgggttcgcatttatctgcggaagagacggtgtgagaatatgttccgagaccacacggagaacagatgacgtctccggatactccgtatcctattccacattttgtttgggaaacacatgccttgcatccggatgatcctttgagaagacaataatatccgggagagcattcacagattctattgtgagtcgtgttacacgatcgcgtcttccgttacaacttagacaagcgggtaaatgattattgcgagatgtgaaggtacccgaaccacacggcgtacatcgtgtgttagtcttgctatcgcataatctggaagcgtatgttcccggacacaaattatggcgtttgtattcgttgtctttacactttccatcggatggtgcatgcggtgctatatctcttccgtttattattatacatgagagaaacaatatatacgagtataatacggacttcatgatttaataatgtagtaatcgttgtcttgttcctgtttcctacttctccaatcatatagatattttctttctatcatggataatatttgtaatggttctttccgtacaacatactgtttagatgatattgcgcataatttccggaggcaaatacgatagtctagattgaccgatggtagactctaatttattgagtgctttgtcgacgagtttacttttacgctccatcgatagatggcactgttctatgagatcgtcgtacatgggaaatgaaatgtgactgtctgaatgtatggctttaagatagctgtgataccgtatacaggtcggtgtcggagattcgaatctctttgaggcgacttatgtcacgatgatggaatctatcttatcgaatgatatatttttcataaatacacttttatagtcctcgtttaaacagaatttactatgtagttccgcgaatgactcgtcccttaataggcagtaggctagtatcttttttacgtagtaatcgtcgtagggagagacatcttgtagaacaacgatttcgttttgttttctcttctgtaactgcttttctggatggccgtattgattatcgagcgtgatactcgctccatattccaataaccgctttgcaaattgtatattattgacatcgaccgcgtaatatagtagagttatcgatcatatctatatcatccatgtacttgcttagtatatcaaatacatctatcagtatggtttcataacagtgatacccgcaattattaaatctcgataatatcagaccgtacatacatagacggccattgttcgatacgtgatttacagccgcgtgtccatattttccacgataaaccttacgacgtttacatcgacgagattattattaacaaagtagtcgtgtagaggatagttgttgtccgttatctaacatgcatcgaacgaccatatcgccgtaatgtaagtagtttatcagtatggcttgtacgatggattcatcctgttgtctaaatctctttagaatgttatcgatgatgtagtggttatattctctggaatcgtacgaagtaatactacgcattacgtcgacaagagtatgacgtctctcaataagaagattaacgatttccatgtctacattatatggggttactctaaatcgcttgtttagataatacgcctctaatatagggctgacgtcgtatactctacacgtgtccacatcctttattaataataatttaacaatctctatatctatggttgagaaagaccagtagtattggatgggtaaagatcctccttcgtctctgccatggatggaaacattgttatcgatcaaacatttaattacatccttggatagagattgagattctctatgagacgatatatagtaatgaagagagttcttacacatatcactgtcgtacatacaggtacgaaatacgtaaccggtgctgtaacattctgatttaagaagccatagcaatacttctggtctcggattaggcgtcgttacgtatatatccaccaatccgagaccattgattgcataattcgtattcttggacggacgtatccgtttatccacaattaggtattttagcagacgtaagtcgatattatccgaatacagatcgaaatcatttatattcgacttgagttcgttagaggaatttgaatagctggatatcagtagatgcacaatctgagattttacgtatctatgcttactgtatactcctagcggagttaatccttcgttgtttctacaaagtctctcgactccgcgagagaacaatcttaatgtctgtatcgcatttattggagacgtaacaatgtagcgcattgtttcctcgtctatctatatgttttgataagttgtgacacgtttcaatttctagttttatttttttgtacgtcacatcttcatccagtagacgacatagaatagtgcactctctaccacaataatccatagctattctggtgctaattattcctatttcacgaaggcaatcattcctcataagatgataaaaagtgtagtggagatttagtatttagcagtgcggatatgatccaagagggtgagatagtcgttctcgttcagaatctttcgcagcataagtagtatgtcgatatacttatcgttgaagactctttataaaagtctatttgtttatatttattgcggatagcagtatttccctataaaaagtatacgtcctgtggtgtctttaatcatgtacatgaatggatggtttatgtagaccttcgtacgatataccatcgaaaagttaatcgtaaatactcctgtaacggccgatgcttctgtatactcctcattaacatctataaacgtcgtatgtagaaatttttctacagtgatagtttcattacacatcttgctaaaatctgcataatatccgaatatattagtaagtcctaaattttctaaaatcggtaccagattatacggttctgtcatttccactttaaactttggcatatacaagtctatacttttagtagataacataccacaccattttttaaatttttcatctgttatatttttttctatgttatatataccttctatgtcgtccggtagtataattaccatactagagtttccctcgtatggaatatcgataatagagaatcctccgaataattcattaatatgtacatattgcaagttattctcggtacccaccatcatatcaacgctggtaactatattcttagaaatataaaacttgtctgtatatgtaagatgtttagaaaatggatatttccacattgctttaaaatggacggcgctaacaactgtcatacgagtattaatggatagcggactagtcaataaggaattaattttaccatttgtcattgtcttaacccattcgttgattagttcctttgtttggttagcattattaaagtttacagtttgaaaatcgtcttttattttttgtaggaaggaggcgtggaactcgatactatcgctaccgtatattttatttgcggtagctagtgtcgcacaatacggaatatctacctccatgtcatcattattgtcatcgggtgtattctcattcatattctctatatattttgatagttgttcagctgtagaaccagctgctccatgatttagaatagataaagtagataaaatggaaactggagaaatcaaaacattttcatcagggtgttttaagattagttctttaaagatatccatggtatagacctaacgataacgatatatatcataaataaataatgttaaatttcaatttatgtttgtaccccgtattcatacttaacaaattggtattgcgtacacaatcaatcatattacataccattaataatgcaagcataaaaaattgttagtagatgtttctaaatataggttccgtaagcaaagaatataagaatgaagcggtaatgataaaatcaatcgttatctaaaatgatcatactcatttattttattctattatattaacacatacatttttaacagcaacacattcaatattgtattgttatttttatattatttacacaattaacaatatattattagtttatattactgaattaataatataaaattcccaatcttgtcataaacacacactgagaaacagcataaacacagaatccatcaaaaatgttgataaattatctgatgttgttgttcgctgctatgataatcagatcattcgccgatagtggtaacgctatcgaaacgacattgccagaaattacaaacgctacaacagatattccagctatcagattatgcggtccagagggagatggatattgtttacacggtgactgtatccacgctagagatattgacggtatgtattgtagatgctctcatggttatacaggcattagatgtcagcatgtagtattagtagactatcaacgttcagaaaacccaaacactacaacgtcatatatcccatctcccggtattatgcttgtattagtaggcattattatgtgttgtctattatctgtttataggttcactcgacgaactaaactacctatacaagatatggttgtgccataatttttataaatttttttatgagtatttttacaaaaatgtataaagtgtatgtcttatgtatatttataaaaatgctaagtatgcgatgtatctatgttatttgtatttatctaaacaatacctctacctctagatattatacaaaaattttttatttcggcatattaaagtaaaatctagttaccttgaaaatgaatacagtgggtggttccgtatcaccagtaagaacataatagtcaaatacagtatccgattgagattttgcatacaatactagtctagaaagaaatttgtaatcatcttctgtgacgggagtccatatatctgtatcatcgtctagtttatcagtgtcccatgctatattcctgttatcatcattagttaatgaaaataactctcgtgcttcagaaaagtcaaatattgtatccatacatacatctccaaaactatcgcttatacgtttatctttaacgatacctatacctagatggttatttactaacagacattttccagatctattgactataactcctatagtttccacatcaaccaagtaatgatcatctattgttatataacaataacataactcttttccatttttatcagtatgtatatctatatcaacgtcgtcgttgtagtgaatagtagtcattgatctattatatgaaacggatatgtctagaacggcaattgttttacgtccagttaacactttcgttgatttaaagtctagagtctttgcaaacataatatccttatccgactttatatttcctgtagggtggtataattttattttgcctccacatatcggtgtttccaaatatattactagacaatattccatatagttattagttaagggtacccaattagaacacgtacgcttattatcatcatttggatcgtatttcataaaagttattgtgttatcgatgtcaacacattctacattttttaatcgtctatatagtatttttctgatattttctataatatcagaattgtcttccatcggaagttgtatactatcggaatcagttacatgtttaaataattctctgatgtcattccttatacaatcaaattcattattaaacagtttaatagtctgtagacctttatcgtcgtaaatatccattgtcttattagttacgcttatttttatgtgtttttacgttgctttattatattttataagaatgattgtttgacgaatcacgagaactattaagacacattattaggtatatattataaaaaagtttttgattacgatgttataagaggaaagaggacacattaacatcatacatcaattaactacattcttataacatcgtaatcaaaagaattgcaattttgatgtataacaactgtcaatgggttatggaattgtatattacatattatacggtatgttggtaacgacaaataccggtcggtaattgtctgccggtgtaatagaattatatatatctatctattacaccggccttgtatacataataataagttgtggtagtatgatctccatatttataatttaggactttgtattcagtatttttggaatcataaaaaataaaaaaaagttttactaatttaaaatttaaaaagtatttacatttttttcactgtttagtcgcggatatggaattcgatcctgccaaaatcaatacatcatctatagatcatgtaacaatattacaatacatagatgaaccaaatgatataagactaacagtatgcattatccgaaatattatatcaatatcacaaaaataaatacacatttggctaatcaatttcgggcttggaaaaaacgtatcgccggaagggactatatgactaacttatctagagatacaggaatacaacaatcaaaacttactgaaactatacgtaactgtcaaaaaaatagaaacatatatggtctatatatacactacaatttagttattaattggataaccgatgtgattatcaatcaatattaagagggttggtaaattggtacatagctaataatacctatactccaaatacacccaataatacaacaaccatttctgagttggatatcatcaaaatactaaataaatacgaggacgtgtatagagtaagtaaagaaaaagaatgtggaatttgctatgaagttgtttactcaaaacgatagatactttggtttattggattcgtgtactcatatattttgcataacatgcatcaatatatggcatagaacacgaagagaaaccggtgcgtcggataattgtcctatatgccgtacccgttttagaaacataacaatgagcaagttctataagctagttaactaataaataaaaagtttaatttgttgacgacgtatgtcgttattttttctcgtataaaagattaatttgattctaatataatctttagtattggataaatatcaattcaaattaattccattagattatatcataaataaaaatagtagcacacaactacttcagcaaacattctttttataaatgccatctagcgtagcgaggacacaagtgaacctataattatcaaatttattagtatcagtcacatgaaggactttacgtagagtgacgattccactatctgtggtacgaacggtttcatcttctttgatgccatcacccagatgttctataaacttggtatcctcgtccgatttcatatcctttgccaaccaatacatatagctaaactcaggcatatgttccacacatcctgaacaatgaaattctccagaagatgttacaatgtctagatttggacatttggtttcaaccgcgttaacatatgagtgaacacacccatacatgaaagcgatgagaaataggattctcatcttgccaaaatatcactagaaaaaatttatttatcagttttaaaggtataaaaaatacttattgttgctcgaatattttgtatttgatggtatacggaagattagaaatgtaggtattatcatcaactgattctatggttttatgtattctatcatgtttcactattgcgttggaaataatatcatatgcttccacatatattttattttgttttaactcataatactcacgtaattctggattattggcatatctatgaataattttagctccatgatcagtaaatattaatgagaacatagtattaccacctaccattatttttttcatctcattcaattcttaattgcaaagatctatataatcattatagcgttgacttatggactctggaatcttagacgatgtacagtcatctataatcatggcatatttaatacattgttttatagcatagtcgttatctacgatgttagatatttctctcaatgaatcaatcacacaatctaatgtaggtttatgacataatagcattttcagcagttcaatgtttttagattcgttgatggcaatggctatacatgtatatccgttatttgatctaatgttgacatctgaaccggattctagcagtaaagatactagagattgtttattatatctaacagccttgtgaagaagtgtttctcctcgtttgtcaatcatgttaatgtctttaagataaggtaggcaaatgtttatagtactaagaattgggcaagcataagacatgtcacaaagacccttttttgtatgtataagtgtaaaaattataacatccatagttggatttacataggtgtccaatcgggatctctccatcatcgagataattgatggcatctcccttccttttttagtagatatttcatcgtgtaagaatcaatattaatatttctaaagtatccgtgtatagcctctttatttaccacagctccatattccactagagggatatcgccgaatgtcatatactcaattagtatatgttggaggacatccgagttcattgttttcaatatcaaagagatggtttccttatcatttctccatagtggtacaatactacacattattccgtgcggctttccattttccaaaaacaatttgaccaaatctaaatctacatctttattgtatctataatcactatttagataatcagccataattcctcgagtgcaacatgttagatcgtctatatatgaataagcagtgttatctattcctttcattaacaatttaacgatgtctatatctatatgagatgacttaatataatattgaagagctgtacaatagtttttatctataaaagacggcttgattccgtgattaattagacatttaacaacttccggacgcacatatgctctcgtatccgactctgaatacagatgagagatgatatacagatgcaatacggtaccgcaatttcgtagttgataatcatcatacgcgtatcagtactcgtcctcataaagaacactgcagccattttctatgaacaaatcaataattttagaaacaggatcattgtcattacataattttctataactgaacgatggttttcacatttaacactcaagtcaaatccatgttctaccaacacctttatcaagtcaacgtctacatttttggatttcatatagctgaatatattaaagttatttatgttgctaaatccagtggcttctagtagagccatcgctatatccttattaactttaacatgtctactatttgtgtattcttctaatggggtaagctgtctccaatttttgcgtaatggattagtgccactgtctagtagtagtttgacgacctcgacattattacaatgctcattaaaaaggtatgcgtgtaaagcattattcttgaattggttcctggtatcattaggatctctgtctttcaacatctgtttaagttcatcaagagccacctcctcattttccaaatagtcaaacattttgactgaatgagctactgtgaactctatacacccacacaactaatgtcattaaatatcatgtcaaaaacttgtacaattattaataaaaataatttagtgtttaaattttaccagttccagattttacacctccgttaatacctccattaaccccactggacgatcctcctccccacattccaccgccaccagatgtataagttttagatcctttattactaccatcatgtccatggataaagacactccacatgccgccactaccccctttagaagacatattaataagacttaaggacaagtttaacaataaaattaatcacgagtaccctactaccaacctacactattatatgattatagtttctatttttacagtaccttgactaaagtttctagtcacaagagcaatactaccaacctacactattatatgattatagtttctatttttataggaacgcgtacgagaaaatcaaatgtctaatttctaacggtagtgttgataaacgattgttatccgcggatacctcctctatcatgtcgtctattttcttactttgttctattaacttattagcattatatattatttgattataaaacttatattgcttattagcccaatctgtaaatatcggattattaacatatcgtttctttgtaggtttatttaacatgtacatcactgtaagcatgtccttaccatttattttaatttgacgcatatccgcaatttctttttcgcagtcggttataaattctatatatgatggatacatgctacatgtgtacttataatcgactaatatgaagtacttgatacatattttcagtaacgatttattattaccacctatgaataagtacctgtgatcgtctaggtaatcaactgttttcttaatacattcgatggttggtaatttactcagaataatttccaatatcttaatatataattctgctatttctgggatatatttatctgccagtataacacaaatagtaatacatgtaaacccatattttgttattatattaatgtctgcgccattatctattaaccattctactaggctgacactatgcgactcaatacaatgataaagtatactacatccatgtttatctattttgtttatatcatcaatatacggcttacaaagttttagtatcgataacacatccaactcacgcatagagaaggtagggaataatggcataatatttattaggttatcatcattgtcattatctacaactaagtttccattttttaaaatatactcgacaactttaggatctctattgccaaatttttgaaaatatttatttatatgcttaaatctatataatgtagctccttcatcaatcatacatttaataacattgatgtatactgtatgataagatacatattctaacaatagatcttgtatagaatctgtatatcttttaagaattgtggatattaggatattattacataaactattacacaattctaaaatataaaacgtatcacggtcgaataatagttgatcaactatataattatcgattttgtgatttttcttcctaaactgtttacgtaaatagttagatagaatattcattagttcatgaccactatagttactatcgaataacgcgtcaaatatttcccgtttaatatcgcatttgtcaagataataatagagtgtggtatgttcacgataagtataataacgcatctctttttcgtgtgaaattaaatagtttattacgtccaaagatgtagcataaccatcttgtgacctagtaataatataataatagagaactgttttacccattctatcatcataatcagtggtgtagtcgtaatcgtaatcgtctaattcatcatcccaattataatattcaccagcacgtctaatctgttctattttgatcttgtatccatactgtatgttgctacatgtaggtattcctttatccaataatagtttaaacacatctacattgggatttgatgttgtagcgtatttttctacaatattaataccatttttgatactatttatttctatacctttcgaaattagtaatttcaataagtctatattgatgttatcagaacatagatattcgaatatatcaaaatcattgatatttttatagtcgactgacgacaataacaaaatcacaacatcgtttttgatattattatttttcttggtaacgtatgcctttaatggagtttcaccatcatactcatataatggatttgcaccactttctatcaatgattgtgcactgctggcatcgatgttaaatgttttacaactatcatagagtatcttatcgttaaccatgattggttgttgatgctatcgcattttttggtttctttcatttcagttatgtatggatttagcacgtttgggaagcatgagctcatatgatttcagtactgtagtgtcagtactattagtttcaataagatcaatctctagatctatagaatcaaaacacgataggtcagaagataatgaatatctgtaggcttcttgttgtactgtaacttctggttttgttagatggttgcatcgtgctttaacgtcaatggtacaaattttatcctcgctttgtgtatcatattcgtccctactataaaattgtatattcagattatcatgcgatgtgtatacgctaacggtatcaataaacggagcacaccatttagtcataaccgtaatccaaaaatttttaaagtatatcttaacgaaagaagttgtgtcattgtctacggtgtatggtactagatcctcataagtgtatatatctagagtaatgtttaatttattaaatggttgataatatggatcctcgtgacaatttccgaagatggaaataagacataaacacgcaataaatctaattgcggacatggttactccttaaaaaaatacgaataatcaccttggctatttagtaagtgtcatttaacactatactcatattaatccatggactcataatctctatacgggattaacggatgttctatatacggggatgagtagttctcttctttaactttatactttttactaatcatatttagactgatgtatgggtaatagtgtttgaagagctcgttctcatcatcagaataaatcaatatctctgtttttttgttatacagatgtattacagcctcatatattacgtaatagaacgtgtcatctaccttattaactttcaccgcatagttgtttgcaaatacggttaatcctttgacctcgtcgatttccgaccaatctgggcgtataatgaatctaaactttaattgcttgtaatcattcgaaataatttttagtttgcatccgtagttatcccctttatgtaactgtaaatttctcaacgcgatatctccattaataatgatgtcgaattcgtgctgtatacccatactgaatggatgaacgaataccgacggcgttaatagtaatttactttttcatctttacatattgggtactagttttactatcataagtttataaattccacaagctactatggaataagccaaccatcttagtataccacacatgtcttaaagtttattaattaattacatgttgttttatatatatcgctacgaatttaaagagaaattagtttaggaagaaaaattatctatctacatcatcacgtctctgtattctacgatagagtgctactttaagatgcgacagatccgtgtcatcaaatatatactccattaaaatgattattccggcagcgaacttgatattggatatatcacaacctttgttaatatctacgacaatagacagcagtcccatggttccataaacagtgagtttatctttctttgaagagatattttgtagagatcttataaaactgtcgaatgacatcgcatttatatctttagctaaatcgtatatgttaccatcgtaatatctaaccgcgtctatcttaaacgtttccatcgctttaaagacgtttccgatagatggtctcatttcatcagtcatactgagccaacaaatataatcgtgtataacatctttgatagaatcagactctaaagaaaacgaatcggctttattatacgcattcatgataaacttaatgaaaaatgtttttcgttgtttaagttggatgaatagtatgtcttaataattgttattatttcattaattaatatttagtaacgagtacactctataaaaacgagaatgacataactaatcataactagttatcaaagtgtctaggacgcgtaattttcatatggtatagatcctgtaagcattgtctgtattctggagctattttctctatcgcattagtgagttcagaatatgttataaatttaaatcgaataacgaacataactttagtaaagtcgtctatattaactcttttattttctagccatcgtaataccatgtttaagatagtatattctctagttactacgatctcatcgttgtctagaatatcacatactgaatctacatccaattttagaaattggtctgtgttacatatctcttctatattattgttgatgtattgtcgtagaaaactattacgtagaccattttctttataaaacgaatatatagtactccaattatctttaccgatatatttgcacacataatccattctctcaatcactacatctttaagattttcgttgttaagatatttggctaaactatataattctattagatcatcaacagaatcagtatatatttttctagatccaaagacgaactctttggcgtcctctataatattcccagaaaagatattttcgtgttttagtttatcgagatctgatctgttcatatacgccatgattgtacggtacgttatgataaccgcataaaataaaaatccattttcatttttaaccaatactattcataattgagattgatgtaatactttgttactttgaacgtaaagacagtacacggatccgtatctccaacaagcacgtagtaatcaaatttggtgttgttaaacttcgcaatattcatcaatttagatagaaacttatactcatcatctgttttaggaatccatgtattattaccactttccaacttatcattatcccaggctatgtttcgtccatcatcgttgcgcagagtgaataattcttttgtattcggtagttcaaatatatgatccatgcatagatcggcaaagctattgtagatgtgatttttcctaaatctaatataaaactcgtttactagcaaacactttcctgatttatcgaccaagacacatatggtttctaaatctatcaagtggtggggatccatagttatgacgcagtaacatatattattacattcttgactgtcgctaatatctaaatatttattgttatcgtattggattctgcatatagatggcttgtatgtcaaagatatagaacacataaccaatttatagtcgcgctttacattctcgaatctaaagttaagagatttagaaaacattatatcctcggatgatgttatcactgtttctggagtaggatatattaaagtctttacagatttcgtccgattcaaataaatcactaaataatatcccacattatcatctgttagagtagtatcattaaatctattatattttatgaaagatatatcactgctcacctctatatttcgtacatttttaaactgtttgtataatatctctctgatacaatcagatatatctattgtgtcggtagacgataccgttacatttgaattaatggtgttccattttacaacttttaacaagttgaccaattcatttctaatagtatcaaactctccatgattaaatattttaatagtatccattttatatcactacggacacaaagtagctgacataaaccattgtataatttttatgttttatgtttattagcgtacacattttggaagttccggcttccatgtatttcctggagagcaagtagatgatgaggaaccagatagtttatatccgtacttgcacttaaagtctacattgtcgttgtatgagtatgatcttttaaacccgctagacaagtatccgtttgatattgtaggatgtggacatttaacaatctgacacgtgggtggatcggaccattctcctcctgaacacaggacactagagttaccaatcaacgaatatccactattgcaactataagttacaacgctcccatcggtataaaaatcctcgtatccgttatgtcttccgttggatatagatggaggggattggcatttaacagattcacaaataggtgcctcgggattccataccatagatccagtagatcctaattcacaatacgatttagattcaccgatcaactgatatccgctattacaagagtacgttatactagagccaaagtctactccaccaatatcaagttggccattatcgatatctcgaggcgatgggcatctccgtttaatacattgattaaagagtgtccatccagtacctgtacatttagcatatataggtcccattttttgctttctgtatccaggtagacatagatattctatagtgtctcctatgttgtaattagcattagcatcagtctccacactattcttaaatttcatattaatgggtcgtgacggaatagtacagcatgatagaacgcatcctattcccaacaatgtcaggaacgtcacgctctccaccttcatatttatttatccgtaaaaatgttatcctggacatcgtacaaataataaaaagcccatatatgttcgctattgtagaaattgtttttcacagttgctcaaaaacgatggcagtgacttatgagttacgttacactttggagtctcatctttagtaaacatatcataatattcgatattacgagttgacatatcgaacaaattccaagtatttgattttggataatattcgtattttgcatctgctataattaagatataatcaccgcaagaacacacgaacatctttcctacatggttaaagtacatgtacaattctatccatttgtcttccttaactatatatttgtatagataattacgagtctcgtgagtaattccagtaattacatagatgtcgccgtcgtactctacagcataaactatactatgatgtctaggcatgggagacttttttatccaacgatttttagtgaaacattccacatcgtttaatactacatatttctcatacgtggtataaactccacccattacatatatatcatcgtttacgaataccgacgcgcctgaatatctaggagtaattaagtttggaagtcttatccatttcgaagtgccgtgtttcaaatattctgccacacccgttgaaatagaaaattctaatcctcctattacatataactttccatcgttaacacaagtactaacttctgattttaacgacgacatattagtaaccgttttccattttttcgttttaagatctacccgcgatacggaataaacatgtctattgttaatcatgccgccaataatgtatagacaattatgtaaaacatttgcattatagaattgtctatctgtattaccgactatcgtccaatattctgttctaggagagtaatgggttattgtggatatataatcagagtttttaatgactactatattatgttttataccatttcgtgtcactggctttgtagatttggatatagttaatcccaacaatgatatagcattgcgcatagtattagtcataaacttgggatgtaaaatgttgatgatatctacatcgtttggatttttatgtatccactttaataatatcatagctgtaacatcctcatgatttacgttaacgtcttcgtgggataagatagttgtcagttcatcctttgataattttccaaattctggatcggatgtcaccgcagtaatattgttgattatttctgacatcgacgcattatatagttttttaattccatatcttttagaaaagttaaacatccttatacaatttgtgaaattaatattatgaatcatagtttttacacatagatctactacaggcggaacatcaattattatggcagcaactagtatcatttctacattgtttatggtgatgtttatcttcttccagcgcatatagtctaatagcgattcaaacgcgtgatagtttataccattcaatataatcgcttcatcctttagatggtgatcctgaatgcgtttaaaaaaattatacggagacgccgtaataatttccttattcacttgtataatttccccattgatagaaaatattacgctttccattcttaaagtactataagtaattatagtataatgtaaacgtttatatattcaatatttttataaaaatcattttgacattaattcctttttaaatttccgtctatcatctatagaaacgtattctatgaatttataaaatgcttttacgtgtcctatcgtaggcgatagaaccgctaaaaagcctatcgaatttctacaaaagaatctgttatatggtatagggagagtataaaacattaaatgtccgtacttattaaagtattcagtagccaatcctaactctttcgaatacttattaatggctcttgttctgtacgaatctatttttttgaacaacggacctagtggtatatcttgttctatgtatctaaaataatgtctgactagatccgttagtttaatatccgcagtcatcttgtctagaatggcaaatctaactgcgggtttaggctttagtttagtttctatatctacatctatgtctttatctaacaccaaaaatataatagctaatattttattacaatcatccggatattcttctacgatctcactaactaatgtttctttggttatactagtatagtcactatcggacaaataaagaaaatcagatgatcgatgaataatacatttaaattcatcatctgtaagatttttgagatgtctcattagaatattattagggttagtactcattatcattcggcagctattacttattttattatttttcaccatatagatcaatcattagatcatcaaaatatgtttcaatcatcctaaagagtatggtgaatgactcttcccatctaatttctgaacgttcaccaatgtctctagccactttggcactaatagcgatcattcgcttagcgtcttctatattattaactggttgatttaatctatctagcaatggaccgtcggacagcgtcattctcatgttcttaatcaatgtacatacatcgccgtcatctaccaattcatccaacaacataagctttttaaaatcatcattataataggtttgatcgttgtcatttctccaaagaatatatctaataagtagagtcctcatgcttagttaacaactattttttatgttaaatcaattagtacaccgctatgtttaatacttattcatattttagtttttaggattgagaatcaatacaaaaattaatgcatcattaattttagaaatacttagtttccacgtagtcaatgaaacatttgaactcatcgtacaggacgttctcgtacaggacgtaactataaaccggtttatatttgttcaagatagatacaaatccgataactttttttacgaattctacgggatccactttaaaagtgtcataccgggttctttttatttttttaaacagatcaatggtgtgatgttgattaggtcttttacgaatttgatatagaatagcgtttacatattctccataatggtcaatcgccatttgttcgtatgtcataaattctttaattatatgacactgtgtattatttagttcatccttgttcattgttaggaatctatccaaaatggcaattatactagaactataggtgcgttgtatacacatattgatgtgtctgtttatacaatccatgatatttggatccatgctactaccttcgggtaaaattgtagcatcatataccatttctagtactttaggttcattattatccattgcagaggacgtcatgatcgaatcataaaaaaatatattatttttatgttattttgttaaaaataatcatcgaatacttcgtaagatactccttcatgaacataatcagttacaaaacgtttatatgaagtaaagtatctacgatttttacaaaagtccggatgcataagtacaaagtacgcgataaacggaataataatagatttatctagtctatctttttctatagctttcatagttagatacatggtctcagaagtaggattatgtaacatcagcttcgataaaatgactgggttatttagtcttacacattcgctcatacatgtatgaccgttaactacagagtctacactaaaatgattgaacaatagatagtctaccattgtttcgtattcagatagtacagcgtagtacatggcatcttcacaaattatatcattgtctaatagatatttgacgcatcttatggatcccacttcaacagccatcttaaaatcatattgctttcctttatcattaataatttctagaacatcatctctatcataaaagatacaaatattaactgtttgatccgtaataacattgctagtcaatagcaatttgttaataagatgcgctgggctcaatgtcttaataagaagtgtaagaggactatctccgaatttgttttgtttattaacatccgttgatggaagtaaaagatctataatgtctacattcttgactgttttagagcatacaatatggagaggtgtatttccatcatgatctggttttgagggactaattcctagtttcatcatccatgagattgtagaagcttttggattgtctgacataagatgtctatgaatatgatttttgccaaatttatccactatcctggcttcgaatccgatggacattatttttttaaacactctttctgaaggatctgtacacgccaacaacggaccacatccttcttcatcaaccgagttgttaatcttggctccatactgtaccaataaatttattctctctatgacttcatcatctgttcccgagagataatatagaggtgttttatgctgtttatcacacgcgtttggatctgcgccgtgcgtcagcagcatcgcgactattctattattattaattttagaagctatatgcaatggataatttccatcatcatccgtctcatttggagagtatcctctatgaagaagttcttcgacaaatcgttcatctagtcctttaattccacaatacgcatgtagaatgtgataattatttccagaaggttcgatagcttgtagcatattcctaaatacatctaaatttttactattatatttggcataaagagatagataatactcggccgacataatgttgtccattgtagtataaaaattaatatttctatttctatttctgtatatttgcaacaatttactctctataacaaatatcataacttagtttttttatgtcaagaaggcactggtttagttcatctataaatgtcacgccataactaccacgcatgccatactcagaattatgataaagatatttatccttggggtgtaggtaatggggattaatctttgttggatcagtctctaagttaacacatgtcacacatgatccatttatagttatatcacacgatgatgatttatgaattgattccggaagatcgctatcgtattttgtggttccacaattcatttccatacatgttattgtcacactaatattatgatgaactttatctagccgctgagtggtaaacaacagaacagatagtttattatctttaccaacaccctcagccgctgccacaaatctctgatccgtatccatgatggtcatgtttatttctagtccgtatccagtcaacactatgttagcatttctgtcgatatagctttcactcatatgacactcaccaataatagtagaattaatgtcgtaatttacaccaatagtgagttcggcggcaaagtaccaataccggtaatcttgtcgaggaggacatatagtattcttgtattctaccgaatacccgagagatgcgatacaaaagagcaagactaatttgtaaaccatcttactcaaaatatgtaacaatagtacgatgcaatgagtaagacaataggaaatctatcttatatacacataattattctatcaattttaccaattagttagtgtaatgttaacaaaaatgtgggagaatctaattagtttttctttacacaattgacgtacatgagtctgagttccttgtttttgctaattatttcatccaatttattattcttgacgatatcgagatcttttgtataggagtcaaacttgtattcaacatgcttttctataatcattttagctatttcggcatcatccaatagtacattttccagattagcagaatagatattaatgtcgtatttgaacagagcctgtaacatctcaatgtctttattatctatagccaatttaatgtccggaatgaagagaagggaattattggtgtttgtcgacgtcatatagtcgagcaagagaatcatcatatccacgtgtccattttttatagtgatgtgaatacaactaaggagaatagccagatcaaaagtagatggtatctctgaaagaaagtaggaaacaatacttacatcattaagcatgacggcatgataaaatgaagttttccatccagttttcccatagaacatcagtctccaatttttcttaacaaacagttttaccgtttgcatgttaccactatcaaccgcataatacaatgcggtgtttcccttgtcatcaaattgtgaatcatccagtccactgaatagcaaaatctttactattttggtatcttccaatgtggctgcctgatgtaatggaaattcattctctagaagatttttcaatgctccagcgttcaacaacgtacatactagacgcacgttattatcagctattgcataatacaaggcactatgtccatggacatccgccttaaatgtatctttactagagagaaagcttttcagctgcttagacttccaagtattaattcgtgacagatccatgtctgaaacgagacgctaattagtgtatattttttcattttttataattttgtcatattgcaccagaattaataatatctttaatagatctgattagtagatacatggctatcgcaaaacaacatatacacatttaataaaaataatatttattaagaaaattcagatttcacgtacccatcaatataaataaaataatgattccttacaccgtacccatattaaggagattccaccttacccataaacaatataaatccagtaatatcatgtctgatgatgaacacaaatggtgtattaaattccagtttttcaggagatgatctcgccgtagctaccataatagtagatgcctctgctacagttccttgttcgtcgacatctatctttgcattctgaaacattttataaatatataatgggtccctagtcatatgtttaaacgacgcattatctggattaaacatactaggagccatcatttcggctatcgacttaatatccctcttattttcgatagaaaatttagggagtttaagattgtacactttattccctaattgagacgaccaatagtctaattttgcagccgtgatagaatctgtgaaatgggtcatattatcacctattgccaggtacatactaatattagcatccttatacggaaggcgtaccatgtcatattctttgtcatcgattgtgattgtatttccttgcaatttagtaactacgttcatcatgggaaccgttttcgtaccgtacttattagtaaaactagcattgcgtgttttagtgatatcaaacggatattgccatatacctttaaaatatatagtattaatgattgcccatagagtattattgtcgagcatattagaatctactacattagacataccggatctacgttctactatagaattaattttattaaccgcatctcgtctaaagtttaatctatataggccgaatctatgatattgttgataatacgacggtttaatgcacacagtattatctacgaaactttgataagttagatcagtgtacgtatatttagatgttttcagcttagctaatcctgatattaattctgtaaatgctggacccagatctctttttctcaaatccatagtcttcaataattctattctagtattacctgatgcaggcaatagcgacataaacatagaaaacgaataaccaaacggtgagaagacaatattatcatcttgaatatttttatacgctactataccggcattggtaaatccttgtagacgataggcggacgctgaacacgctaacgatagtatcaataacgcaatcatgattttatggtattaataattaaccttatttttatgttcggtataaaaaaattattgatgtctacacatccttttgtaattgacatctatatatccttttgtataatcaactctaatcactttaacttttacagttttccctaccagtttatccctatattcaacatatctatccatatgcatcttaacactctctgccaagatagcttcagagtgaggatagtcaaaaagataaatatatagagcataatcattctcgtatactctgccctttattacatcacccgcattgggcaacgaataacaaaatgcaagcatcttgttaacgggctcgtaaattgggataaaaattatgtttttattgtcttatatctattttattcaagagaatattcaggaatttctttttccggttgtatctcgtcgcagtatatatcatttgtacattgtttcatattttttaatagtttacaccttttagtaggactagtatcgtacaattcatagctgtattttgaattccaatcacgcataaaaatatcttccaattgttgacgaagacctaatccatcatccggtgtaatattaatagatgctccacatgtatccgtaaagtaatttcctgtccaatttgaggtacctatataggccgttttatcggttaccatatatttggcatggtttaccctagaatacggaatgggaggatcagcatctggtacaataaatagctttacttctatatttatgtttttagattttagcatagcgatagatcttaaaaagtttctcatgataaacgaagatcgttgccagcaactaatcaatagcttaacggatacttgtctgtctatagcggatcttcttaattcatcttctatataaggccaaaacaaaattttacccgccttcgaataaataatagggataaagttcataacagatacataaacgaatttactcgcatttctaatacatgacaataaagcggttaaatcattggttctttccatagtacatagttgttgcggtgcagaagcaataaatacagagtgtggaacgccgcttacgttaatactaagaggatgatctgtattataatacgacggataaaagtttttccaattatatggtagattgttaactccaagataccagtatacctcaaaaatttgagtgagatccgctgccaagttcctattattgaagatcgcaatacccaattccttgacctgagttagtgatctccaatccatgttagcgcttcctaaataaatatgtgtattatcagatatccaaaattttgtatgaagaactcctcctaggatatttgtaatatctatgtatcgtacttcaactccggccatttgtagtctttcaacatcctttaatggtttgttagatttattaacggctactctaactcgtactcctcttttgggtaattgtacaatctcgtttaatattatcgtgccgaaattcgtacccacttcatccgataaactccaataaaaagatgatatatctagtgtttttgtggtattggatagaatttccctccacatgttaaatgtagacaaatatactttatcaaattgcatacctataggaatagtttctgtaatcactgcgattgtattatccggattcattttatttgttaaaagaataatcctatatcacttcactctattaaaaatccaagtttctatttctttcatgactgattttttaacttcatccgtttccttatgaagatgatgtttggcaccttcataaatttttatttctctattacaatttgcatgttgcatgaaataatatgcacctaaaacatcgctaatcttattgtttgttccctggagtatgagagtcggggggtgttaatcttggaaattatttttctaaccttgttggtagccttcaagacctgactagcaaatccagccttaattttttcatgattgactaatgggtcgtattggtatttataaactttatccatatctctagatactgattctggacatagctttccgactggcgcatttggtgtgatggttcccataagtttggcagctagcagattcagtcttgaaacagcatctgcattaactagaggagacattagaatcattgctgtaaacaagtttggattatcgtaagaggctagctcccatggaatgacccaataagtagatttaatagttaccacgtgctgtaccaaagtcatcaatcatcattttttcaccattacttcttccatgtccaatatgatcatgtgagaatactaaaattcctaacgatgatatgttttcagctagttcgtcataacgtccagaatgtttaccagctccatgacttatgaatactaatgccttaggatatgtaataggtttccaatatttacaatatatgtaatcattgtccagattgaacatacagtttgcactcatgattcacgttatataactatcaatattaacagttcgtttgatgatcatattatttttatgttttattgataattgtaaaaacatacaattaaatcaatatagaggaaggagacggctactgtcttttgtaagatagtcatggcgactaaattagattatgaggatgctgttttttactttgtggatgatgataaaatatgtagtcgcgactccatcatcgatctaatagatgaatatattacgtggagaaatcatgttatagtgtttaacaaagatattaccagttgtggaagactgtacaaggaattgatgaagttcgatgatgtcgctatacggtactatggtattgataaaattaatgagattgtcgaagctatgagcgaaggagaccactacatcaattttacaaaagtccatgatcaggaaagtttattcgctaccataggaatatgtgctaaaatcactgaacattggggatacaaaaagatttcagaatctagattccaatcattgggaaacattacagatttgatgaccgacgataatataaacatcttgatactttttctagaaaaaaaattgaattgatgatataggggtcttcataacgcataattattacgttagcattctatatccgtgttaaaaaaaattatcctatcatgtatttgagagttttatatgtagcaaacatgatagctgtgatgccaataagctttagatattcacgcgtgctagtgttagggatggtattatctggtggtgaaatgtccgttatataatctacaaaacaatcatcgcatatagtatgcgatagtagagtaaacatttttatagtttttactggattcatacatcgtctacccaattcggttataaatgaaattgtcgccaatcttacacccaaccccttgttatccattagcatagtattaacttcgttatttatgtcataaactgtaaatgattttgtagatgccatatcatacatgatattcatgtccctattataatcattactaactttatcacaatatatgttgataatatctatatatgatctagtctttgtgggcaactgtctatacaagtcgtctaaacgttgtttactcatatagtatcgaacagccatcattacatggtcccgttccgttgatagataatcgagtatgttagtggacttgtcaaatctatataccatattttctggaagtggatatacatagtcgtgatcaacattattgctagcctcatcttctatatcctgtactataccattatctatatcatctacataatctatgatattattacacataaacatcgacaacatactattgtttattatctaagtcctgttgatccaaacccttgatctcctctatttgtactatctagagattgtacttcttccagttctggataatatatacgttgatagattagctgagctattctatctccagtatttacattaaacgtacattttccattattaataagaatgactcctatgtttcccctataatcttcgtctattacaccacctcctatatcaatgccttttagtgacagaccagacctaggagctattctaccatagcagaacttaggcatggacatactaatatctgtcttaattaactgtctttctcctggagggatagtataatcgtaagcgctatacaaatcatatccggcagcacccggcgattgcctagtaggagatttagctctgttagtttccttaacaaatctaactggtgagttaatattcatgttgaacataaaactaatattttatttcaaaattatttaccatcccatatattccatgaataagtgtgatgattgtacacttctatagtatctatatacgatccacgataaaatcctcctatcaatagcagtttattatccactatgatcaattctggattatccctcggataaataggatcatctatcagagtccatgtattgctggattcacaataaaattccgcatttctaccaaccaagaataaccttctaccgaacactaacgcgcatgatttataatgaggataataagtggatggtccaaactgccactgatcatgattgggtagcaaatattctgtagttgtatcagtttcagaatgtcctcccattacgtatataacattgtttatggatgccactgctggattacatctaggtttcagaagactcggcatattaacccaagcagcatccccgtggaaccaacgctcaacagatgtgggatttggtagacctcctactacgtataatttattgttagcgggtatcccgctagcatacagtctggggctattcatcggaggaattggaatccaattgtttgatatataatttacagctatagcattgttatgtatttcattgttcatccatccaccgatgagatatactacttctccaacatgagtacttgtacacatatggaatatatctataatttgatccatgttcataggatactctatgaatggatacttgtatgatttgcgtggttgtttatcacaatgaaatattttggtacagtctagtatccattttacattatttatacctctgggagaaagataatttgacctgattacatttttgataaggagtagcagatttcctaatttatttcttcgcctcatataccacttaatgacaaaatcaactacataatcctcatctggaacatttagttcatcgctttctagaataagtttcatagatagataatcaaaattgtctatgatgtcatcttccagttccaaaaagtgtttggcaataaagtttttagtatgacataagagattggatagtccgtattctatacccatcatgtaacactcgacacaatattcctttctaaaatctcgtaagataaagtttatacaagtgtagatgataaattctacagaggttaatatagaagcacgtaataaattgacgacgttatgactatctatatatacctttccagtatatgagtaaataactatagaagttaaactgtgaatgtcaaggtctagacaaacccttgtaactggatctttatttttcgtgtatttttgacgtaaatgtgtgcgaaagtaaggagataactttttcaatatcgtagaattgactattatattgcctcctatggcatcaataattgttttgaatttcttagtcatagacaatgctaatatattcttacagtacacagtattgacaaatatcggcatttatgtttctttaaaagtcaacatctagagaaaaatgattatctttttgagacataactcccattttttggtattcacccacacgtttttcgaaaaaattagtttttccttccaatgatatattttccatgaaatcaaacggattggtaacattataaatttttttaaatcccaattcagaaatcaatctatccgcgacgaattctatatatgttttcatcatttcacaattcattcctataagtttaactggaagagccgcagtaagaaattcttgttcaatggatactgcatctgttataatagatctaacggtttcttcactcggtggatgcaataaatgtttaaacatcaaacatgcgaaatcgcagtgcagaccctcgtctctactaattagttcgttggaaaacgtgagtccgggcattaggccacgctttttaagccaaaatatggaagcgaatgatccagaaaagaaaattccttctactgcagcaaaggcaataagtctctctccataaccggcgctgtcatgtatccacttttgagcccaatcggccttcttttttacacaaggcatcgtttctatggcattaaagagatagtttttttcattactatctttaacataagtatcgatcaaaagactatacatttccgaatgaatgttttcaatggccatctgaaatccgtagaaacatctagcctcggtaatctgtacttctgtacaaaatcgttccgccaaattttcattcactattccgtcactggctgcaaaaaacgccaatacatgttttataaaatatttttcgtctggtgttagtttattccaatcattgatatctttagatatatctacttcttccactgtccaaaatgatgcctctgcctttttatacatgttccagatgtcatgatattggattgggaaaataacaaatctatttggatttggtgcaaggatgggttccataactaaattaacaataacaataaattttttttcagttatctatatgcctgtacttggattttttgtacatcgatatcgccgcaatcactacaataattacaagtattattgatagcattgttattagtactatcataattaaattatctacattcatgggtgctgaataatcgttattatcatcattatcattttgtaattgtgacatcatactagataaatcgtttgcgagattgttgtgggaagcgggcatggaggatgcattatcattattatttaacgccttccatttggattcacaaatgttacgcacattcaacattttatggaaactataattttgtgaaaacaaataacaagaaaactcgtcatcgttcaaatttttaacgatagtaaaccgattaaacgtcgagctaatttctaacgctagcgactctgttggatatgggtttccagatatatatcttttcagttcccctacgtatctataatcatctgtaggaaatggaagatatttccatttatctactgttcctaatatcatatgtggtggtgtagtagaaccattaagcgcgaaagatgttatttcgcatcgtattttaacttcgcaataatttctggttagataacgcactctaccagtcaagtcaatgatattagcctttacagatatattcatagtagtcgtaacgatgactccatcttttagatgcgatactcctttgtatgtaccagaatcttcgtacctcaaactcgatatatttaaacaagttaatgagatattaacgcgttttatgaatgatgatatataaccagaagttttatcctcggtggctagcgctataaccttatcattataataccaactagtgtgattaatatgtgacacgtcagtgtgggtacaaatatgtacattatcgtctacgtcgtattcgatacatccgcatacagccaacaaatataaaatgacaaatactctaacgccgttcgtacccatcttgatgcggtttaataaatgttttgatttcaatttattgtaaaaaaagattcggttttatactgttcgatattctcattgcttatattttcatctatcatctccacacagtcaaatccgtggttagcatgcacctcatcaaccggtaaaagactatcggactcttctatcattataactctagaatatttaatttggtcattattaatcaagtcaattatcttatttttaacaaacgtgagtattttactcattttttataaaaacttttagaaatatacagactctatcgtgtgtctatatcttctttttatatccaatgtatttatgtctgatttttcttcatttatcatatataatggtccaaattctacacgtgcttcggattcatccagatcattaaggttcttataattgtaacatccttctcttccctcttctacatcttccttcttattcttattcttagcgtcacagaatctaccacagcaggatcccatgacgagcgtcatattaaactaatccattttcaattataatatatgattagtaatgaccattaaaataaaaaatattcttcataaccggcaagaaagtgaaaagttcacattgaaactatgtcagtagtatacatcatgaaatgatgatatatatatactctattttggtggaggattatatgatataattcgtggataatcatttttaagacacatttctttattcgtaaatcttttcacgttaaatgagtgtccatattttgcaatttcttcatatgatggcggtgtacgtggacgaggctgctcctgttcttgttgtggtcgccgactgtcgtgtctgcgtttagatccctccattatcgcgattgcgtagatggagtactattttataccttgtaattaaatttttttattaattaaacgtataaaaacgttccgtatctgtatttaagagccagatttcgtctaatagaacaaatagctacagtaaaaataactagaataattgctacacccactagaaaccacggatcgtaatacggcaatcggttttcgataataggtggaacgtatattttatttaaggacttaacaattgtctgtaaaccacaatttgcttccgcggatcctgtattaactatctgtaaaagcatatgttgaccgggcggagccgaacattctccgatatctaatttctgtatatctataatattattaacctccgcatacgcattacagttcttttctagcttggataccgcactaggtacatcgtctagatctattcctatttcctcagcgatagctcttctatccttttccggaagcaatgaaatcacttcaataaatgattcaaccatgagtgtgaaactaagtcgagaattactcatgcatttgttagttattcggagcgcgcaatttttaaactgtcctataacctctcctatatgaatagcacaagtgacattagtagggatagaatgttgagctaatttttgtaaataactatctataaaaagattatacaaagttttaaactctttagtttccgccatttatccagtctgagaaaatgtctctcataataaatttttccaagaaactaattgggtgaagaatggaaacctttaatctatatttatcacagtctgttttggtacacatgatgaattcttccaatgccgtactaaattcgatatctttttcgatttctggatatgtttttaataaagtatgaacaaagaaatggaaatcgtaataccagttatgtttaactttgaaattgttttttattttcttgttaatgattccagccacttgggaaaagtcaaagtcgtttaatgccgatttaatacgttcattaaaaacaaactttttatcctttagatgaattattattggttcattggaatcaaaaagtaagatattatcgggtttaagatctgcgtgtaaaaagttgtcgcaacagggtagttcgtagattttaatgtataacagagccatctgtaaaaagataaactttatgtattgtaccaaagatttaaatcctaatttgatagctaactcggtatctactttatctgccgaatacagtgctaggggaaaaattataatgtttcctctttcatattcgtagttagttctcttttcatgttcgaaaaagtgaaacatgcggttaaaatagtttataacattaatattactgttaataactgccggataaaagtgggatagtaatttcacgaatttgatactgtcctttctctcgttaaacgcctttaaaaaaactttagaagaatatctcaatgagagttcctgaccatccatagtttgtatcaataatagcaacatatgaagaacacgtttatacagagtatgtaaaaatgttaatttatagtttaatcccatggcccacgcacacacgattaattttttttcatctccctttagattgttgtatagaaatttgggtactgtgaactccgccgtagtttccatgggactatataattttgtggcctcgaatacaaattttactacatagttatctatcttaaagactataccatatcctcctgtagatatgtgataaaaatcgtcgtttataggataaaatcgtttatccttttgttggaaaaaggatgaattaatgtaatcattctcttctatctttagtagtgtttccttattaaaattcttaaaataatttaacaatctaactgacggagcccaattttggtgtaaatctaattgggacattatattgttaaaatacaaacagtctcctaatataacagtatctgataatctatggggagacatccattgatattcaggggatgaatcattggcaacacccatttattgtacaaaaagccccaatttacaaacgaaagtccaggtttgatagagacaaacaattaactattttgtctctgtttttaacacctccacagtttttaatttctttagtaatgaaattattcacaatatcagtatcttctttatctaccagagattttactaacttgataaccttggctgtctcattcaatagggtagtaatatttgtatgtgtgatattgatatctttttgaattgtttcttttagaagtgattctttgatggtgccagcatacgaattacaataatgcagaaactcggttaacatgcaggaattatagtaagccaattccaattgttgcctgtgttgtattagagtgtcaatatgagcaatggtgtccttgcgtttctctgatagaatgcgagcagcgattttggcgttatcatttgacgatatttctggaatgacgaatcctgtttctactaactttttggtaggacaaagtgaaacaatcaagaagatagcttctcctcctatttgtggaagaaattgaactcctctagatgatctactgacgatagtatctccttgacagatattggaccgaattacagaagtacctggaatgtaaagccctgaaaccccctcattttttaagcagattgttgccgtaaatcctgcactatgcccaagatagagagctcctttggtgaatccatctctatgtttcagtttaaccaagaaacagtcagctggtctaaaatttccatctctatctaatacagcatctaacttgatgtcaggaactatgaccggtttaatgttatatgtaacattgagtaaatccttaagttcataatcatcactgtcatcagttatgtacgatccaaacaatgtttctaccggcatagtggatacgaagatgctatccatcagaatgtttccctgattagtattttctatatagctattcttctttaaacgattttccaaatcagtaactatgttcatttttttaggagtaggacgcctagccagtatggaagaggattttctagatcctctcttcaacatctttgatctcgatggaatgcaaaaccccatagtgaaacaaccaacgataaaaataatattgtttttcactttttataattttaccatctgactcatggattcattaatatctttataagagctactaacgtataattctttataactgaactgagatatatacaccggatctatggtttccataattgagtaaatgaatgctcggcaataactaatggcaaatgtatagaacaacgaaattatactagagttgttaaagttaatattttctatgagctgttccaataaattatttgttgtgactgcgttcaagtcataaatcatcttgatactatccagtaaaccgtttttaagttctggaatattatcatcccattgtaaagcccctaattcgactatcgaatatcctgctctgatagcagtttcaatatcgacggacgtcaatactgtaataaaggtggtagtattgtcatcatcgtgataaactacgggaatatggtcgttagtaggtacggtaactttacacaacgcgatatataactttccttttgtaccatttttaacgtagttgggacgtcctgcagggtattgttttgaagaaatgatatcgagaacagatttgatacgatatttgttggattcctgattattcactataatataatctagacagatagatgattcgataaatagagaaggtatatcgttggtaggataatacatccccattccagtattctcggatactctattgatgacactagttaagaacatgtcttctattctagaaaacgaaaacatcctacatggactcattaaaacttctaacgctcctgattgtgtctcgaatgcctcgtacaaggatttcaaggatgccatagattctttgaccaacgatttagaattgcgtttagcatctgatttttttattaaatcgaatggtcggctctctggtttgctaccccaatgataacaatagtcttgtaaagataaaccgcaagaaaatttatacgcatccatccaaataaccctagcaccatcggatgatattaatgtattattatagattttccatccacaattattgggccagtatactgttagcaacggtatatcgaatagattactcatgtaacctactagaatgatagttcgtgtactagtcataatatctttaatccaatctaaaaaatttaaaattagattttttacactgttaaagttaacaaaagtattacccgggtacgtggatatcatatatggcattggtccattatcagtaatagctccataaactgatacggcgatggtttttatatgtgtttgatctaacgaggaagaaattcgcgcccacaattcatctctagatatgtatttaatatcaaacggtaacacatcaatttcgggacgcgtatatgtttctaaatttttaatccaaatataatgatgacctatatgccctattatcatactgtcaactatagtacacctagggaacttacgatacatctgtttcctataatcgttaaattttacaaatctataacatgctaaaccttttgacgacagccattcattaatttctgatatggaatctgtattctcgataccgtatcgttctaaagccagtgctatatctccctgttcgtgggaacgctttcgtataatatcgatcaacggataatctgaagtttttggagaataatatgactcatgatctatttcgtccataaacaatctagacataggaattggaggcgatgatcttaattttgtgcaatgagtcgtcaatcctataacttctaatcttgtaatattcatcatcgacataatactatctatgttatcatcgtatattagtataccatgaccttcttcatttcgtgccaaaatgatatacagtcttaaatagttacgcaatatctcaatagtttcataattgttagctgttttcatcaaggtttgtatcctgtttaacatgatggcgttctataacgtctctattttctatttttaattttttaaatttttaacgatttactgtggctagatacccaatctctctcaaatatttttttagcctcgcttacaagctgtttatctatactattaaaactgacgaatccgtgattttggtaatgggttccgtcgaaatttgccgaagtgatatgaacatattcgtcgtcgactatcaacaattttgtattattctgaatagtgaaaaccttcacagatagatcattttgaacacacaacgcatctagacttttggcggttgccatagaatatacgtcgttcttatcccaattaccaactagaagtctgatcttaactcctctattaatggctgcttctataatggagttgtaaatgtcgggccaatagtagctattaccgtcgacacgtgtagtgggaactatggccaaatgttcaatatctatactagtcttagctgacctgagtttatcaataactacatcggtatctagatctctagaatatcccaataggtgttccggagaatcagtaaagaacactccacctataggattcttaatatgatacgcagtgctaactggcaaacaacaagccgcagagcataaattcaaccatgaattttttgcgctattaaaggctttaaaagtatcaaatcttctacgaagatctgtggccagcgggggataatcagaatatacacctaacgttttaatcgtatgtatagatcctccagtaaatgacgcgtttcctacataacatctttcatcatctgacacccaaaaacaaccgagtagtagtcccacattattttttttatctatattaacggttataaaatttatatccgggcagtgactttgtagctctcccagatttcttttccctcgttcatctagcaaaactattattttaatccctttttcagatgcctcttttagtttatcaaaaataagcgctcccctagtcgtactcagaggattacaacaaaaagatgctatgtatatatatttcttagctagagtgataatttcgttaaaacattcaaatgttgttaaatgatcggatctaaaatccatattttctggtagtgtttctaccagcctacattttgctcccgcaggtaccgatgcaaatggccacatttagttaacataaaaacttatacatcctgttctatcaacgattctagaatatcatcggctatatcgctaaaattttcatcaaagtcgacatcacaacctaactcagtcaatatattaagaagttccatgatgtcatcttcgtctatttctatatccgtatccattgtagattgttgaccgattatcgagtttaaatcattactaatactcaatccttcagaatacaatctgtgtttcattgtaaatttataggcggtgtatttaagttggtagattttcaattatgtattaatatagcaacagtagttcttgctcctccttgattctagcatcctcttcattattttcttctacgtacataaacatgtccaatacgttagacaacacaccgacgatggcggccgcagatctcgagttatgatctacttccttaccgtgcaataaattagaatatattttctacttttacgagaaattaattattgtatttattatttatgggtgaaaaacttactataaaaagcgggtgggtttggaattagtgaaagcttaaaaattgaaattttattttttttttttggaatataaataagctcgaagtcgacagatctaggcctggtaccaggaggaggaattcagcttaaagatgacttcgaaagtttatgatccagaacaaaggaaacggatgataactggtccgcagtggtgggccagatgtaaacaaatgaatgttcttgattcatttattaattattatgattcagaaaaacatgcagaaaatgctgttatttttttacatggtaacgcggcctcttcttatttatggcgacatgttgtgccacatattgagccagtagcgcggtgtattataccagatcttattggtatgggcaaatcaggcaaatctggtaatggttcttataggttacttgatcattacaaatatcttactgcatggtttgaacttcttaatttaccaaagaagatcatttttgtcggccatgattggggtgcttgtttggcatttcattatagctatgagcatcaagataagatcaaagcaatagttcacgctgaaagtgtagtagatgtgattgaatcatgggatgaatggcctgatattgaagaagatattgcgttgatcaaatctgaagaaggagaaaaaatggttttggagaataacttcttcgtggaaaccatgttgccatcaaaaatcatgagaaagttagaaccagaagaatttgcagcatatcttgaaccattcaaagagaaaggtgaagttcgtcgtccaacattatcatggcctcgtgaaatcccgttagtaaaaggtggtaaacctgacgttgtacaaattgttaggaattataatgcttatctacgtgcaagtgatgatttaccaaaaatgtttattgaatcggatccaggattcttttccaatgctattgttgaaggcgccaagaagtttcctaatactgaatttgtcaaagtaaaaggtcttcatttttcgcaagaagatgcacctgatgaaatgggaaaatatatcaaatcgttcgttgagcgagttctcaaaaatgaacaagcggccgccgccaccatgagcaagggcgaggaactgttcactggcgtggtcccaattctcgtggaactggatggcgatgtgaatgggcacaaattttctgtcagcggagagggtgaaggtgatgccacatacggaaagctcaccctgaaattcatctgcaccactggaaagctccctgtgccatggccaacactggtcactaccttcacctatggcgtgcagtgcttttccagatacccagaccatatgaagcagcatgactttttcaagagcgccatgcccgagggctatgtgcaggagagaaccatctttttcaaagatgacgggaactacaagacccgcgctgaagtcaagttcgaaggtgacaccctggtgaatagaatcgagctgaagggcattgactttaaggaggatggaaacattctcggccacaagctggaatacaactataactcccacaatgtgtacatcatggccgacaagcaaaagaatggcatcaaggtcaacttcaagatcagacacaacattgaggatggatccgtgcagctggccgaccattatcaacagaacactccaatcggcgacggccctgtgctcctcccagacaaccattacctgtccacccagtctgccctgtctaaagatcccaacgaaaagagagaccacatggtcctgctggagtttgtgaccgctgctgggatcacacatggcatggacgagctgtacaagtgagcggccgccctgctagcaagcttgctagcggccgctcgagatctgcggccgctacagacacgaatatgactaaaccgatgaccatttaaaaacccctctctagctttcacttaaactgtatcgatcattcttttagcacatgtataatataaaaacattattctatttcgaatttaggcttccaaaaatttttcatccgtaaaccgataataatatatatagacttgttaatagtcggaataaatagattaatgcttaaactatcatcatctccacgattagagatacaatatttacattctttttgctgtttcgaaactttatcaatacacgttaatacaaacccaggaaggagatattgaaactgaggctgttgaaaatgaaacggtgaatacaataattcagataatgtaaaatcatgattccgtattctgatgatattagaactgctaatggatgtcgatggtatgtatctaggagtatctattttaacaaagcatcgatttgctaatatacaattatccttttgattaattgttattttattcatattcttaaaaggtttcatatttatcaattcttctacattaaaaatttccatttttaatttatgtagccccgcaatactcctcattacgtttcattttttgtctataatatccattttgttcatctcggtacatagattatccaattgagaagcgcatttagtagttttgtacattttaagtttattgacgaatcgtcgaaaactagttatagttaacattttattatttgataccctgatattaatacccctgccgttactattatttataactgatgtaatccacgtaacattggaattaactatcgatagtaatgcatcgacgcttccaaaattgtctattataaactcaccgataatttttttattgcatgttttcatattcattaggattatcaaatctttaatcttattacgattgtatgcgttgatattacaagacgtcattctaaaagacggaggatctccatcaaatgccagacaatcacgtacaaagtacatggaaataggttttgttctattgcgcatcatagatttatatagaacacccgtagaaatactaatttgttttactctataaaatactaatgcatctatttcatcgttttgtataacgtctttccaagtgtcaaattccaaatttttttcattgatagtaccaaattcttctatctctttaactacttgcatagataggtaattacagtgatgcctacatgccgttttttgaaactgaatagatgcgtctagaagcgatgctacgctagtcacaatcaccactttcatatttagaatatatatatgtaaaaatatagtagaatttcattttgtttttttctatgctataaatgaattctcattttgcatctgctcatactccgttttatattaataccaaagaaggaagatatctggttctaaaagccgttaaagtatgcgatgttagaactgtagaatgcgaaggaagtaaagcttcctgcgtactcaaagtagataaaccctcatcgcccgcgtgtgagagaagaccttcgtccccgtccagatgcgagagaatgaataaccctggaaaacaagttccgtttatgaggacggacatgctacaaaatatgttcgcggctaatcgcgataatgtagcttctagacttttgtcctaaaatactattatatccttttcgatattaataaatccgtgtcgtccaggttttttatctctttcagtatgtgaatagataggtattttatctctattcatcatcgaatttaagagatccgataaacattgtttgtattctccagatgtcagcatctgatacaacaatatatgtgcacataaacctctggcacttatttcatgtaccttccccttatcactaaggagaatagtatttgagaaatatgtatacatgatattatcatgaattagatatacagaatttgtaacactctcgaaatcacacgatgtgtcggcgttaagatctaatatatcactcgataacacattttcatctagatacactagacattttttaaagctaaaatagtctttagtagtaacagtaactatgcgattattttcatcgatgatacatttcatcggcatattattacgcttaccatcaaagactataccatgtgtatatctaacgtattctagcatggttgccatacgcgcattaaacttttcaggatctttggatagatcttccaatctatctatttgagaaaacatttttatcatgttcaatagttgaaacgtcggatccactatatagatattatctataaagattttaggaactacgttcatggtatcctggcgaatattaaaactatcaatgatatgattatcgttttcatcttttatcaccatatagtttctaagatatgggattttacttaatataatattatttcccgtgataaattttattagaaaggccaaatctataagaaaagtcctagaattagtctgaagaatatctatatcgccgtatagtatatttggattaattagatatagagaatatgatccgtaacatatacaacttttattatggcgtctaagatattcttccatcaacttattaacatttttgactagggaagatacattatgacgtcccattacttttgccttgtctattactgcgacgttcatagaatttagcatatctcttgccaattcttccattgatgttacattataagaaattttagatgaaattacatttggagctttaatagtaagaactcctaatatgtccgtgtatgtggtcactaatacagattgtagttctataatcgtaaataatttacctatattatatgtttgagtctgtttagaaaagtagctaagtatacgatcttttatttctgatgcagatgtattaacatcggaaaaaaatctttttttattcttttttactaaagatacaaatatgtctttgttaaaaacagttattttctgaatatttctagcttgtaattttaacatatgatattcgttcacactaggtactctgcctaaataggtttctataatctttaatgtaatattaggaaaagtattctgatcaggattcctattcattttgaggatttaaaactctgattattgtctaatatggtctctacgcaaactttttcacagagcgatagagtttttgataactcgtttttcttaagaaatataaaactactgtctccagagctcgctctatcttttattttatctaattcgatacaaactcctgatactggttcagaaagtaattcattaattttcagtcctttatagaagatatttaatatagataatacaaaatcttcagtttttgatatcgatctgattgatcctagaactagatatattaataacgtgctcattaggcagtttatggcagcttgataattagatatagtatattccagttcatatttattagataccgcattgcccagattttgatattctatgaattcctctgaaaataaatccaaaataactagacattctattttttgtggattagtgtactctcttccctctatcatgttcactactggtgtccacgatgataaatatctagagggaatataatatagtccataggatgccaatctagcaatgtcgaataactgtaattttattcttcgctcttcattatgaattgattcttgaggtataaacctaacacaaattatattattagacttttcgtatgtaatgtctttcatgttataagtttttaatcctggaatagaatctattttaatgaggcttttaaacgcagagttctccaacgagtcaaagcataatactctgttgtttttcttatatacgatgttacgattttcttctttgaatggaataggtttttgaattagtttataattacaacataatagataaggaagtgtgcaaatagtacgcggaaaaaacataatagctcccctgttttcatccatggttttaagtaaatgatcactggcttctttagtcaatggatattcgaacattaaccgtttcatcatcattggacagaatccatatttcttaatgtaaagagtgatcaaatcattgtgtttattgtaccatcttgttgtaaatgtgtattcggttatcggatctgctcctttttctattaaagtatcgatgtcaatctcgtctaagaattcaactatatcgacatatttcatttgtatacacataaccattactaacgtagaatgtataggaagagatgtaacgggaacagggtttgttgattcgcaaactattctaatacataattcttctgttaatacgtcttgcacgtaatctattatagatgccaagatatctatataattattttgtaagatgatgttaactatgtgatctatataagtagtgtaataattcatgtattttgatatatgttccaactctgtctttgtgatgtctagtttcgtaatatctatagcatcctcaaaaaatatattcgcatatattcccaagtcttcagttctatcttctaaaaaatcttcaacgtatggaatataataatctattttacctcttctgatatcattaatgatatagtttttgacactatcttctgtcaattgattcttattcactatatctaagaaacggatagcgtccctaggacgaactactgccattaatatctctattatagcttctggacataattcatctattataccagaattaatgggaactattccgtatctatctaacatagttttaagaaagtcagaatctaagacttgatgttcatatattggttcatacatgaaatgatctctattgatgatagtgactatttcattctctgaaaattggtaactcattctatatatgctttccttgttgatgaaggatagaatatactcaatagaatttgtaccaacaaactgttctcttatgaatcgtatatcatcatctgaaataatcatgtaaggcatacatttaacaattagagacttgtctcctgttatcaatatactattcttgtgataatttatgtgtgaggcaaatttgtccacgttctttaattttgttatagtagatatcaaatccaatggagctacagttcttggcttaaacagatatagtttttctggaacaaattctacaacattattataaaggactttgggtagataagtgggatgaaatcctattttaattaatgcgatagccttgtcctcgtgcagatatccaaacgcttttgtgatagtatggcattcattgtctagaaacgctctacgaatatctgtgacagatatcatctttagagaatatactagtcgcgttaatagtactacaatttgtattttttaatctatctcaataaaaaaattaatatgtatgattcaatgtataactaaactactaactgttattgataactagaatcagaatctaatgatgacgtaaccaagaagtttatctactgccaatttagctgcattatttttagcatctcgtttagattttccatcggccttatcgaatactcttccgtcgatgtctacacaggcataaaatgtaggagagttactaggcccaactgattcaatacgaaaagaccaatctctcctagtaatttggcagtactcattaataacggtgacagggttagcatctttccaatcaataatttttttagccggaataacatcatcaaaagacttatgatcctctctcattgatttttcgcgggatacatcatctattatgacgtcagccatagcatcagcatccggcttatccgcctccgttgtcataaaccaacgaggaggaatatcgtcggagctgtacaccatagcactacgttgaagatcgtacagagctttattaacttctcgcttctccatattaagttgtctagttagttgtgcagcagtagctccttcgattccaatgtttttaatagccgcacacacaatctctgcgtcagaacgctcgtcaatatagatcttagacatttttagagagaactaacgcaaccagcaataaaactgaacctactttatcatttttttattcatcatcctctggtggttcgtcgttcctatcaaatgtagctctgattaacccgtcatctataggtgatgctggttctggagattctggaggagatggattattatctggaagaatctctgttatttccttgttttcatgtatcgattgcgttgtaacattaagattgcgaaatgctctaaatttgggaggcttaaagtgttgtttgcaatctctacacgcgtgtctaactagtggaggttcgtcagctgctctagtttgaatcatcatcggcgtagtattcctacttttacagttaggacacggtgtattgtatttctcgtcgagaacgttaaaataatcgttgtaactcacatcctttattttatctatattgtattctactcctttcttaatgcattttataccgaataagagatagcgaaggaattctttttcggtgccgctagtacccttaatcatatcacatagtgttttatattccaaatttgtggcaatagacggtttatttctatacgatagtttgtttctggaatcctttgagtattctataccaatattattctttgattcgaatttagtttcttcgatattagattttgtattacctatattcttgatgtagtactttgatgatttttccatggcccattctattaagtcttccaagttggcatcatccacatattgtgatagtaattctcggatatcagtagcggctaccgccattgatgtttgttcattggatgagtaactactaatgtatacattttccatttataacacttatgtattaactttgttcatttatattttttcattattatgttgatattaacaaaagtgaatatatatatgttaataattgtattgtggttatacggctacaattttataatgagtgaaagtcagtgtccgatgatcaatgacgatagctttactctgaaaagaaagtatcaaatcgatagtgcggagtcaacaataaaaatggataagaagaggataaagtttcagaatagagccaaaatggtaaaagaaataaatcagacaataagagcagcacaaactcattacgagacattgaaactaggatacataaaatttaagagaatgattatgactactactctagaagatatagcaccatctattccaaataatcagaaaacttataaactattctcggacatttcagccatcggcaaagcatcacagaatccgagtaagatggtatatgctctgctgctttacatgtttcccaatttgtttggagatgatcatagattcattcgttatagaatgcatccaatgagtaaaatcaaacacaagatcttctctcctttcaaacttaatcttattagaatattagtggaagaaagattctataataatgaatgcagatctaataaatggagaataattggaacacaagttgataaaatgttgatagctgaatctgataaatatacaatagatgcaaggtataacctaaaacccatgtatagaatcaagggagaatctgaagaagataccctctttatcaaacagatggtagaacaatgtgtgacatcccaggaattggtggaaaaagtgttgaagatactgtttagagatttgttcaagagtggagaatacaaagcgtacagatacgatgatgatgtagaaaatggatttattggattggatacactaaaattaaacattgttcatgatatagttgaaccatgtatgcctgttcgtaggccagtggctaagatactgtgtaaagaaatggtaaataaatactttgagaatccgctacatattattggtaaaaatcttcaagagtgcattgactttgttagtgaataggcatttcatctttctccaatactaattcaaattgttaaattaataatggatagtataaatagttattagttataagatagtaaaaataattattagaataagagtgtagtatcatagataactctcttctataaaaatggattttattcgtagaaagtatcttatatacacagtagaaaataatatagattttttaaaggatgatacattaagtaaagtaaacaattttaccctcaatcatgtactagctctcaagtatctagttagcaattttcctcaacacgttattactaaggatgtattagctaataccaatttttttgttttcatacatatggtacgatgttgtaaagtgtacgaagcggttttacgacacgcatttgatgcacccacgttgtacgttaaagcattgactaagaattatttatcgtttagtaacgcaatacaatcgtacaaggaaaccgtgcataaactaacacaagatgaaaaatttttagaggttgccgaatacatggacgaattaggagaacttataggcgtaaattatgacttagttcttaatccattatttcacggaggggaacccatcaaagatatggaaatcatttttttaaaactgtttaagaaaacagacttcaaagttgttaaaaaattaagtgttataagattacttatttgggcatacctaagcaagaaagatacaggcatagagtttgcggataatgatagacaaaatatatacactctatttcaacaaactggtagaatcgtccatagcaatctaacagaaacgtttagagattatatctttcccggagataagactagctattgggtgtggttaaacgaaagtatagctaatgatgcggatatcgttcttaatagacacgccattaccatgtatgataaaattcttagttatatatactctgagataaaacaaggacgcgttaataaaaacatgcttaagttagtttatatctttgagcctgaaaaagatatcagagaacttctgctagaaatcatatatgatattcctggagatatcctatctattattgatgcaaaaaacgacgattggaaaaaatattttattagtttttataaagctaattttattaacggtaatacatttattagtgatagaacgtttaacgaggacttattcagagttgttgttcaaatagatcccgaatatttcgataatgaacgaattatgtctttattctctacgagtgctgcggacattaaacgatttgatgagttagatattaataacagttatatatctaatataatttatgaggtgaacgatatcacattagatacaatggatgatatgaagaagtgtcaaatctttaacgaggatacgtcgtattatgttaaggaatacaatacatacctgtttttgcacgagtcggatcccatggtcatagagaacggaatactaaagaaactgtcatctataaaatccaagagtagacggctgaacttgtttagcaaaaacattttaaaatattatttagacggacaattggctcgtctaggtcttgtgttagatgattataaaggagacttgttagttaaaatgataaaccatcttaagtctgtggaggatgtatccgcattcgttcgattttctacagataaaaaccctagtattcttccatcgctaatcaaaactattttagctagttataatatttccatcatcgtcttatttcaaaggtttttgagagataatctatatcatgtagaagaattcttggataaaagcatccatctaaccaagacggataagaaatatatacttcaattgataagacacggtagatcatagaacagaccaaatatattattaataatttgtatatacatagatataattatcacacatttttgataaatgggaactgctgcaacaattcagactcccaccaaattaatgaataaagaaaatgcagaaatgattttggaaaaaattgttgatcatatagttatgtatattagtgacgaatcaagtgattcagaaaataatcctgaatatattgattttcgtaacagatacgaagactatagatctctcattataaaaagtgatcacgagtttgtaaagctatgtaaaaatcatgcggagaaaagttctccagaaacgcaacaaatgattatcaaacacatatacgaacaatatcttattccagtatctgaagtactattaaaacctataatgtccatgggtgacataattacatataacggatgtaaagacaatgaatggatgctagaacaactctctaccctaaactttaacaatctccgcacatggaactcatgtagcataggcaatgtaacgcgtctgttttatacattttttagttatctgatgaaagataaactaaatatataagtataatcccattctaatactttaacctgatgtattagcatcttattagaatattaacctaactaaaagacataacataaaaactcattacatagttgataaaaagcggtaggatataaatattatggctgccaccgttccgcgttttgacgacgtgtacaaaaatgcacaaagaagaattctagatcaagaaacattttttagtagaggtctaagtagaccgttaatgaaaaacacatatctatttgataattacgcgtatggatggataccagaaactgcaatttggagtagtagatacgcaaacctagatgctagtgactattatcccatttcgttgggattacttaaaaagttcgagtttctcatgtctctatataaaggtcctattcccgtatatgaagaaaaagtaaatactgaattcatagccaatggatcgttctctggtagatacgtatcatatcttcgaaagttttctgcccttccaacaaacgagtttattagttttttgttactgacttccattccaatctataatatcttgttctggtttaaaaacacacagtttgatattactaaacacacattattcagatacgtctatacagataatgccaaacacctggcgttggctaggtatatgcatcaaacaggagactataagcctttgtttagtcgtctcaaagagaattatatatttaccggtcccgttccaataagtatcaaagatatagatcaccctaatcttagtagagcaagaagtccatccgattatgagacattagctaatattagtactatattgtactttaccaagtatgatccggtattaatgtttttattgttttacgtacctgggtattcaattactacaaaaattactccagccgtagaatatctaatggataaactgaatctaacaaagagcgacgtacaactgttgtaaattattttatgcttcgtaaaatgtaggttttgaaccaaacattctttcaaagaatgagatgcataaaactttattatccaatagattgactatttcggacgtcaatcgtttaaagtaaacttcgtaaaatattctttgatcactgccgagtttaaaacttctatcgataattgtctcatatgttttaatatttacaagttttttggtccatggtacattagccggacaaatatatgcaaaataatatcgttctccaagttctatagtttctggattatttttattatattcagtaactaaatacatattagggttatctgcggatttataatttgagtgatgcattctactcaacataaataattctagaggagacgatctactatcaaattcggatcgtaaatctgtttctaaagaacggagaatatctatacatacctgattagaattcatccgtccttcagacaacatctcagacagtctggttttgtacatcttaatcatattcttatgaaacttggaaacatctcttctagtttcactagtacctttattaattctctcaggtacagattttgaattcgacgatgctgagtatttcatcgttgtatatttcttcttcgattgcataatcagattcttatataccgcctcaaactctattttaaaattattaaacaatactctattattaatcagtcgttctaactctttcgctatttctatagacttatctacatcttgactgtctatctctgtaaacacggagtcggtatctccatacacgctacgaaaacgaaatctgtaatctataggcaacgatgttttcacaatcggattaatatctctatcgtccatataaaatggattacttaatggattggcaaaccgtaacataccgttagataactctgctccatttagtaccgattctagatacaagatcattctacgtcctatggatgtgcaactcttagccgaagcgtatgagtatagagcactatttctaaatcccatcagaccatatactgagttggctactatcttgtacgtatattgcatggaatcatagatggccttttcagttgaactggtagcctgttttagcatctttttatatctggctctctctgccaaaaatgttcttaatagtctaggaatggttccttctatcgatctatcgaaaattgctatttcagagatgaggttcggtagtctaggttcacaatgaaccgtaatatatctaggaggtggatatttctgaagcaatagctgattatttatttcttcttccaatctattggtactaacaacgacaccgactaatgtttccggagatagatttccaaagatacacacattaggatacagactgttataatcaaagattaatacattattactaaacattttttgttttggagcaaataccttaccgccttcataaggaaacttttgttttgtttctgatctaactaagatagttttagtttccaacaatagctttaacagtggacccttgatgactgtactcgctctatattcgaataccatggattgaggaagcacatatgttgacgcacccgcgtctgtttttgtttctactccataatactcccacaaatactgacacaaacaagcatcatgaatacagtatctagccatatctaaagctatgtttagattataatccttatacatctgagctaaatcaacgtcatcctttccgaaagataatttatatgtatcattaggtaaagtaggacataatagtacgactttaaatccattttcccaaatatctttacgaattactttacatataatatcctcatcaacagtcacataattacctgtggttaaaacctttgcaaatgcagcggctttgcctttcgcgtctgtagtatcgtcaccgatgaacgtcatttctctaactcctctatttaatactttacccatgcaactgaacgcgttcttggatatagaatccaatttgtacgaatccaatttttcaaatttttgaatgaatgaatatagatcgaaaaatatagttccattattgttattaacgtgaaacgtagtattggccatgccgcctactcccttatgactagactgatttctctcataaatacagagatgtacagcttcctttttgtccggagatctaaagataattttctctcctgttaataactctagacgattagtaatatatctcagatcaaagttatgtccgttaaaggtaacgacgtagtcgaacgttagttccaacaattgtttagctattcgtaacaaaactatttcagaacatagaactagttctcgttcgtaatccatttccattagtgactgtatcctcaaacatcctctatcgacggcttcttgtatttcctgttccgttaacatctcttcattaatgagcgtaaacaataatcgtttaccacttaaatcgatataacagtaacttgtatgcgagattgggttaataaatacagaaggaaacttcttatcgaagtgacactctatatctagaaataagtacgatcttgggatatcgaatctaggtatttttttagcgaaacagttacgtggatcgtcacaatgataacatccattgttaatctttgtcaaatattgctcgtccaacgagtaacatccgtctggagatatcccgttagaaatataaaaccaactaatattgagaaattcatccatggtggcattttgtatgctgcgtttctttggctcttctatcaaccacatatctgcgacggagcattttctatctttaatatctagattataacttattgtctcgtcaatgtctatagttctcatctttcccaacggcctcgcattaaatggaggaggagacaatgactgatatatttcgtccgtcactacgtaataaaagtaatgaggaaatcgtataaatacggtctcgccatttcgacatctggatttcagatataaaaatctgttttcaccgtgactttcaaaccaattaatgcaccgaacatccatttatagaatttagaaatatattttcatttaaatgaatcccaaacattggggaagagccgtatggaccattatttttatagtactttcgcaagcgggtttagacggcaacatagaagcgtgtaaacgaaaactatatactatagttagcactcttccatgtcctgcatgtagacggcacgcgactatcgctatagaggacaataatgtcatgtctagcgatgatctgaattatatttattattttttcatcagattatttaacaatttggcatctgatcccaaatacgcgatcgatgtgacaaaggttaaccctttataaacttaacccattataaaacttatgattagtcacaactgaaataaccgcgtgattattttttggtataattctacacggcatggtttctgtgactatgaattcaacccccgttacattagtgaaatctttaacaaacagcaagggttcgtcaaagacataaaactcattgtttacaatcgaaatagaccccctatcacacttaaaataaaaaatatccttatcctttaccaccaaataaaattctgattggtcaatgtgaatgtattcacttaacagttccacaaatttatttattaactccgaggcacatacatcgtcggtattttttatggcaaactttactcttccagcatccgtttctaaaaaaatattaacgagttccatttatatcatccaatattattgaaatgacgttgatggacagatgatacaaataagaaggtacggtacctttgtccaccatctcctccaattcatgctctattttgtcattaactttaatgtatgaaaacagtacgccacatgcttccatgacagtgtgtaacactttggatacaaaatgtttgacattagtataattgtccaagactgtcaatctataatagatagtagctataatatattctatgatggtattgaagaagatgacaaccttggcatattgatcatttaacacagacatggtatcaacagatagcttgaatgaaagagaatcagtaattggaataagcgtcttctcgatagagtgtccgtataccaacatgtctgatattttgatgtattccattaaattatttagttttttctttttattctcgttaaacagcatttctgtcaacggaccccaacatcgttgaccgattaagttttgattgatttttccgtgtaaggcgtatctagtcagatcgtatagcctatccaataatccatcgtctgtgtgtagatcacatcgtacactttttaattctctatagaagagcgacagacatctggagcaattacagacagcaatttctttattctctacagatgtaagatacttgaagacattcctatgatgatgcagaattttggataacacggtattgatggtatctgttaccataattcctttgatggctgatagtgtcagagcacaagatttccaatctttgacaatttttagcaccattatctttgttttgatatctatatcagacagcatggtgcgtctgacaacacagggattaagacggaaagatgaaatgattctctcaacatcttcaatagataccttgctattttttctggcattatctatatgtgcgagaatatcctctagagaatcagtatcctttttgatgatagtggatctcaatgacatgggacgtttaaaccttcttattctatcaccagattgcatggtgatttgtcttctttcttttatcataatgtaatctctaaattcatcggcaaattgtctatatctaaaatcataatatgagatgtttacctctacaaatatctgttcgtccaatgttagagtatttacatcagttttgtattccaaattaaacatggcaacggatttaattttatattcctctattaagtcctcgtcgataataacagaatgtagataatcatttaatccgtcgtacatggttggaagatgcttgttgacaaaatctttaattgtcttgatgaaggtgggactatatctaacatcttgattaataaaatttataacattgtccataggatactttgtaactagttttatacacatctcttcatcggtaagtttagacagaatatcgtgaacaggtggtatattatattcatcagatatacgaagaacaatgtccaaatctatattgtttaatatattatatagatgtagcgtagctcctacaggaatatctttaactaagtcaatgatttcatcaaccgttagatctattttaaagttaatcatataggcattgatttttaaaaggtatgtagccttgactacattctcattaattaaccattccaagtcattgtgtgtaagaagattatattctatcataagcttgactacatttggtcccgataccattaaagaattcttatgatataaggaaacagattttaggtactcatctactctacaagaattttggagagccttaacgatatcagtgacgtttattatttcaggaggaaagaatctaacattgagaatatcggaattaatagcttccagatacagtgattttggcaatagtccgtgtaatccataatccagtaacacgagctggtgcttgctagacaccttttcaatgtttaatttttttgaaataagctttgataaagccttcctcgcaaattccggatacatgaacatgtcggcgacatgattaagtattgttttttcattatttttatattttctcaacaagttctcaataccccaatagatgatagaatatcacccaatgcgtccatgttgtctatttccaacaggtcgctatatccaccaatagaagtttttccaaaaaagattctaggaacagttctaccaccagtaatttgttcaaaataatcccgcaattcattttcgggtttaaattctttaatatcgacaatttcatacgctcctcttttgaaactaaacttatttagaatatccagtgcatttctacaaaaaggacatgtatacttgacaaaaattgtcactttgttattggccaacctttgttgtacaaattcctcggccattttaatatttaagtgatataaaactatctcgacttatttaactctttagtcgagatatatggacgcagatagctatatgatagccaactacagaaggcaaacgctataaaaaacataattacgacgagcatatttataaatatttttattcagcattacttgatatagtaatattaggcacagtcaaacattcaaccactctcgatacattaactctctcattttctttaacaaattctgcaatatcttcgtaaaaagattcttgaaactttttagaatatctatcgactctagatgaaatagcgttcgtcaacatactatgttttgtatacataaaggcgcccattttaacagtttctagtgacaaaatgctagcgatcctaggatcctttagaatcacatagattgacgattcgtctctcttagtaactctagtaaaataatcatacaatctagtacgcgaaataatattatccttgacttgaggagatctaaacaatctagttttgagaacatcgataagttcatcgggaatgacatacatactatctttaatagaactcttttcatccagttgaatggattcgtccttaaccaactgattaatgagatcttctattttatcattttccagatgatatgtatgtccattaaagttaaattgtgtagcgcttctttttagtctagcagccaatactttaacatcactaatatcgatatacaaaggagatgatttatctatggcattaagaattcgtttttcgacatccgtcaaaaccaattcctttttgcctgtatcatccagttttccatcctttgtaaagaaattattttctactagactattaataagactgataaggattcctccataattgcacaatccaaactttttaacaaaactagactttacgagatctacaggaatgcgtacttcaggttttttagcttgtgattttttcttttgcggacattttctagtaaccaactcatctaccatttcattgattttagcagtgaaataagctttcaatgcacgggcactgatactattgaaaacgagttgatcttcaaattccgccatttaagttcaccaaacaacttttaaatacaaatatatcaatagtagtagaataagaactataaaaaaaataataattaaccaaccccaacaaccggtattattagttgatgtggtagttttctcatcacttagaacagatttaacaatttctataaagtctgtcaaatcatcttccggagaccccataaatacaccaaatatagcggcgtacaacttatccatttatacattgaatattggcttttctttatcgctatcttcatcatattcatcatcaatatcaacaagtcccagattacgagccagatcttcttctacattttcagtcattgatacacgttcactatctccagagagtccgataacgttagccaccacttctctatcaatgattagtttcttgagcgcgaaagtaatttttgtttccgttccggatctatagaagacgataggtgtgataattgccttggccaattgtctttctcttttactgagtgattctagttcaccttctatagatctgagaatggatgattctccagtcgaaacatattctaccatggatccgtttaatttgttgatgaagatggattcatccttaaatgttttctctgtaatagtttccaccgaaagactatgcaaagaatttggaatgcgttccttgtgcttaatgtttccatagacggcttctagaagttgatacaacataggactagccgcggtaacttttatttttagaaagtatccatcgcttctatcttgtttagatttatttttataaagtttagtctctccttccaacataataaaagtggaagtcatttgactagataaactatcagtaagttttatagagatagacgaacaattagcgtattgagaagcatttagtgtaacgtattcgatacattttgcattagatttactaatcgattttgcatactctataacacccgcacaagtctgtagagaatcgctagatgcagtaggtcttggtgaagtttcaactctcttcttgattaccttactcatgattaaacctaaataattgtactttgtaatataatgatatatattttcactttatctcatttgagaataaaaatgtttttgtttaaccactgcatgatgtacagatttcggaatcgcaaaccaccagtggttttattttatccttgtccaatgtgaattgaatgggagcggatgcgggtttcgtacgtagatagtacattcccgtttttagaccgagactccatccgtaaaaatgcatactcgttagtttggaataactcggatctgctatatggatattcatagattgactttgatcgatgaaggctcccctgtctgcagccatttttatgatcgtcttttgtggaatttcccaaatagttttataaactcgcttaatatcttctggaaggtttgtattctgaatggatccaccatctgccataatcctattcttgatctcatcattccataattttctctcggttaaaactctaaggagatgcggattaactacttgaaattctccagacaatactctccgagtgtaaatattactggtatacggttccaccgactcattatttcccaaaatttgagcagttgatgcagtcggcataggtgccaccaataaactatttctaagaccgtatgttctgattttatcttttagaggttcccaattccaaagatccgacggtacaacattccaaagatcatattgtagaataccgttactggcgtacgatcctacatatgtatcgtatggtccttccttctcagctagttcacaactcgcctctaatgcaccgtaataaatggtttcgaagatcttcttatttagatcttgtgcttccaggctatcaaatggataatttaagagaataaacgcgtccgctaatccttgaacaccaataccgataggtctatgtctcttattagagatttcagcttctggaataggataataattaatatctataattttattgagatttctgacaattactttgaccacatccttcagtttgagaaaatcaaatcgcccatctattacaaacatgttcaaggcaacagatgccagattacaaacggctacctcattagcatccgcatattgtattatctcagtgcaaagattactacacttgatagttcctaaattttgttgattactctttttgttacacgcatccttataaagaatgaatggagtaccagtttcaatctgagattctataatcgctttccagacgactcgagcctttattatagatttgtatctcctttctctttcgtatagtgtatacaatcgttcgaactcgtctccccaaacattgtccaatccaggacattcatccggacacatcaacgaccactctccgtcatccttcactcgtttcataaagagatcaggaatccaaagagctataaatagatctctggttctatgttcctcgtttcctgtattctttttaagatcgaggaacgccataatatcagaatgccacggttccaagtatatggccataactccaggccgtttgtttcctccctgatctatgtatctagcggtgttattataaactctcaacattggaataataccgtttgatataccattggtaccggagatatagcttccactggcacgaatattactaattgatagacctattccccctgccattttagagattaatgcgcatcgttttaacgtgtcatagataccctctatgctatcatcgatcatgttaagtagaaaacagctagacatttggtgacgactagttcccgcattaaataaggtaggagaagcgtgcgtaaaccatttttcagaaagtagattgtacgtctcaatagctgagtctatatcccattgatgaattcctactgcgacacgcattaacatgtgctgaggtctttcaacgatcttgttgtttattttcaacaagtaggatttttccaaagttttaaaaccaaaatagttgtatgaaaagtctcgttcgtaaataataaccgagttgagtttatccttatatttgttaactatatccatggtgatacttgaaataatcggagaatgtttcccatttttaggattaacatagttgaataaatcctccatcacttcactaaatagtttttttgtttccttgtgtagatttgatacggctattctggcggctagaatggcataatccggatgttgtgtagtacaagtggctgctatttcggctgccagagtgtccaattctaccgttgttactccattatatattccttgaataaccttcatagctattttaataggatctatatgatccgtgtttaagccataacataattttctaatacgagacgtgattttatcaaacatgacattttccttgtatccatttcgtttaatgacaaacatttttgttggtgtaataaaaaaattatttaacttttcattaatagggatttgacgtatgtagcgtacaaaatgattgttcctggtatatagataaagagtcctatatatttgaaaatcgttacggctcgattaaactttaatgattgcatagtgaatatatcattaggatttaactccttgactatcatggcggcgccagaaattaccatcaaaagcattaatacagttataccgatcgcagttagaacggttatagcatccaccatttatatctaaaaattagatcaaagaatatgtgacaaagtcctagttgtatactgagaattgacgaaacaatgtttcttacatatttttttcttattagtaaccgacttaatagtaggaactggaaaactagacttgattattctataagtatagatacccttccaaataatattctctttgataaaagttccagaaaatgtagaattttttaaaaagttatcttttgctattaccaagattgtgtttagacgcttattattaatatgagtgatgaaatccacaccgcctctagatatcgcctttatttccacattagatggtaaatccaatagtgaaactatctttttaggaatgtatggactcgcgtttagaggagtaaacgtcttaggcgtcggaaaggatgattcatcaaacgaataaacaatttcacaaatggatgttaatgtattagtaggaaattttttgacgctattggaattgaagattctaatggatgatgttctacctatttcatccgataacatgttaatttccgacaccaacggttttaatatttcgatgatatacggtagtctctctttcggacttatatagcttattccacaatacgagtcattatatactccaaaaaacaaaataactagtataaaatctgtatcgaatgggaaaaacgaaattatcgacataggtatagaatccggaacattgaacgtattaatacttaattctttttctgtggtaagtaccgataggttattgacattgtatggttttaaatattctataacttgagacttgatagatattagtgatgaattgaaaattatttttatcaccacgtgtgtttcaggatcatcgtcgacgcccgtcaaccaaccgaacggagtaaaataaatatcattaatatatgctctagatattagtatttttatcaatcctttgattatcatcttctcgtaggcgaatgattccatgatcaagagtgatttaagaacatcctccggagtattaatgggcttagtaaacagtccatcgttgcaataataaaagttatccaagttaaaggatattatgcattcgtttaaagatatcacctcatctgacggagacaattttttggtaggttttagagactttgaagctacttgtttaacaaagttattcatcgtcgtctactattctatttaattttgtagttaatttatcacatatcacattaattgactttttggtccacttttccatacgtttatattcttttaatcctgcgttatccgtttccgttatatccagggatagatcttgcaagttaaatagaatgctcttaaataatgtcattttcttatccgctaaaaatttaaagaatgtataaacctttttcagagatttgaaactcttaggtggtgtcctagtacacaatatcataaacaaactaataaacattccacattcagattccaacagctgattaacttccacattaatacagcctattttcgctccaaatgtacattcgaaaaatctgaataaaacatcgatgtcacaatttgtattatccaatacagaatgtttgtgattcgtgttaaaaccatcggagaaggaatagaaataaaaattattatagtggtggaattcagttggaatattgcctccggagtcataaaaggatactaaacattgttttttatcataaattacacatttccaatgagacaaataacaaaatccaaacattacaaatctagaggtagaacttttaattttgtctttaagtatatacgataagatatgtttattcataaacgcgtcaaatttttcatgaatcgctaaggagtttaagaatctcatgtcaaattgtcctatataatccacttcggatccataagcaaactgagagactaagttcttaatacttcgattgctcatccaggctcctctctcaggctctattttcatcttgacgacctttggattttcaccagtatgtattcctttacgtgataaatcatcgattttcaaatccatttgtgagaagtctatcgccttagatactttttcccgtagtcgaggtttaaaaaaatacgctaacggtatactagtaggtaactcaaagacatcatatatagaatggtaacgcgtctttaactcgtcggttaactctttcttttgatcgagttcgtcgctactattgggtctgctcaggtgccccgactctactagttccaacatcataccgataggaatacaagacactttgccggcggttgtagatttatcatatttttccactacatatccgttacaatttgttaaaaatttagatacatctatattgctacataatccagctagtgaatatatatgacataataaattggtaaatcctagttctggtattttactaattactaaatctgtatatctttccatttatcatggaaaagaatttaccagatatcttcttttttccaaactgcgttaatgtattctcttacaaatattcacaagatgaattcagtaatatgagtaaaacggaacgtgatagtttctcattggccgtgtttccagttataaaacatagatggcataacgcacacgttgtaaaacataaaggaatatacaaagttagtacagaagcacgtggaaaaaaagtatctcctccatcactaggaaaacccgcacacataaacctaaccgcgaagcaatatatatacagtgaacacacaataagctttgaatgttatagttttctaaaatgtataacaaatacagaaatcaattcgttcgatgagtatatattaagaggactattagaagctggtaatagtttacagatattttccaattccgtaggtaaacgaacagatactataggtgtactagggaataagtatccatttagcaaaattccattggcctcattaactcctaaagcacaacgagagatattttcagcgtggatttctcatagacctgtagttttaactggaggaactggagtgggtaagacgtcacaggtacccaagttattgctttggtttaattatttatttggtggattctctactctagataaaatcactgactttcacgaaagaccagtcattctatctcttcctaggatagctttagttagattgcatagcaataccattttaaaatcattgggatttaaggtactagatggatctcctatttctttacggtacggatctataccggaagaattaataaacaaacaaccaaaaaaatatggaattgtattttctacccataagttatctctaacaaaactatttagttatggcactcttattatagacgaagttcatgagcatgatcaaataggagatattattatagcagtagcgagaaagcatcatacgaaaatagattctatgtttttaatgactgccacgttagaggatgacagggaacggctaaaagtatttttacctaatcccgcatttatacatattcctggagatacactgtttaaaattagcgaggtatttattcataataagataaatccatcttccagaatggcatacatagaagaagaaaagagaaatttagttactgctatacagatgtatactcctcctgatggatcatccggtatagtctttgtggcatccgttgcacagtgtcacgaatataaatcatatttagaaaaaagattaccgtatgatatgtatattattcatggtaaggtcttagatatagacgaaatattagaaaaagtgtattcatcacctaatgtatcgataattatttctactccttatttggaatccagcgttactatacgcaatgttacacacatttatgatatgggtagagtttttgtccccgctccttttggaggatcgcaacaatttatttctaaatctatgagagatcaacgaaaaggaagagtaggaagagttaatcctggtacatacgtctatttctatgatctgtcttatatgaagtctatacagcgaatagattcagaatttctacataattatatattgtacgctaataagtttaatctaacactccccgaagatttgtttataatccctacaaatttggatattctatggcgtacaaaggaatatatagactcgttcgatattagtacagaaacatggaataaattattatccaattattatatgaagatgatagagtatgctaaactttatgtactaagtcctattctcgctgaggagttggataactttgagaggacgggagaattaactagtattgtacgagaagccattttatctctaaatttacaaattaagattttaaattttaaacataaagatgatgatacgtatatacacttttgtaaaatattattcggtgtctataacggaacaaacgctactatatattatcatagacctctaacgggatatatgaatatgatttcagatactatatttgttcctgtagataataactaaaaatcaaactctaatgaccacatctttttttagagatgaaaaattttccacatctccttttgtagacacgactaaacattttgcagaaaaaagtttattagtgtttagataatcgtatacttcatcagtgtagatagtaaatgtgaacagataaaaggtattcttgctcaatagattggtaaattccatagaatatattaatcctttcttcttgagatcccacatcatttcaaccagagacgttttatccaatgatttacctcgtactataccacatacaaaactagattttgcagtgacgtcgtacctggtattcctaccaaacaaaattttacttttagttcttttagaaaattctaaggtagaatctctatttgccaatatgtcatctatggaattaccactagcaaaaaatgatagaaatatatattgatacatcgcagctggttttgatctactatactttaaaaacgaatcagattccataattgcctgtatatcatcagctgaaaaactatgttttacacgtattccttcggcatttctttttaatgatatatcttgtttagacaatgataaagttatcatgtccatgagagacgcgtctccgtatcgtataaatatttcattagatgttagacgcttcattaggggtatacttctataaggtttcttaatcagtccatcattggttgcgtcaagaactactatcggatgttgttgggtatctctagtgttacacatggccttactaaagtttgggtaaataactatgatatctctattaattatagatgcatatatttcattcgtcaaggatattagtatcgacttgctatcgtcattaatacgtgtaatgtaatcatataaatcatgcgatagccaaggaaaatttaaatagatgttcatcatataatcgtcgctataattcatattaatacgttgacattgactaatttgtaatatagcctcgccacgaagaaagctctcgtattcagtttcatcgataaaggataccgttaaatataactggttgccgatagtctcatagtctattaagtggtaagtttcgtacaaatacagaatccctaaaatattatctaatgttggattaatctttaccataactgtataaaatggagacggagtcataactattttaccgtttgtacttactggaatagatgaaggaataatctccggacatgctggtaaagacccaaatgtctgtttgaagaaatccaatgttccaggtcctaatctcttaacaaaaattacgatattcgatcccgatatcctttgcattctatttaccagcatatcacgaactatattaagattatctatcatgtctattctcccaccgttatataaatcgcctccgctaagaaacgttagtatatccatacaatggaatacttcatttctaaaatagtattcgttttctaattctttaatgtgaaatcgtatactagaaagggaaaaattatctttgagttttccgttagaaaagaaccacgaaactaatgttctgattgcgtccgattccgttgctgaattaatggatttacaccaaaaactcatataacttctagatgtagaagcattcgctaaaaaattagtagaatcaaaggatataagtagatgttccaacaagtgagcaattcccaagatttcatctatatcattctcgaatccgaaattagaaattcccaagtagatatcctttttcatccgatcgttgatgaaaatacgaactttattcggtaagacaatcatttactaaggagtaaaataggaagtaatgttcgtatgtcgttatcatcgtataaattaaaggtgtgttttttaccattaagtgacattataattttaccaatattggaattataatataggtgtatttgcgcactcgcgacggttgatgcatcggtaaatatagctgtatctaatgttctagtcggtatttcatcatttcgctgtctaataatagcgttttctctatctgtttccattacagctgcctgaagtttattggtcggataatatgtaaaataataagaaatacatacgaataacaaaaataaaataagatataataaagatgccatttagagatctaattttgtttaacttgtccaaattcctacttacagaagatgaggaatcgttggagatagtgtcttccttatgtagaggatttgaaatatcttataatgacttgataacttactttccagataggaaataccataaatatatttataaagtatttgaacatgtagatttatcggaggaattaagtatggaattccatgatacaactctgagagatttagtctatcttagattgtacaagtattccaagtgtatacggccgtgttataaattaggagataatctaaaaggcatagttgttataaaggacaggaatatttatattagggaagcaaatgatgacttgatagaatatctcctcaaggaatacactcctcagatttatacatattctaatgagcgcgtccccataactggttcaaaattaattctttgtggattttctcaagttacatttatggcgtatacaacgtcgcatataacaacaaataaaaaggtagatgttctcgtttccaaaaaatgtatagatgaactagtcgatccaataaattatcaaatacttcaaaatttatttgataaaggaagcggaacaataaacaaaatactcaggaagatattttattcggtaacaggtggccaaactccataggtagctttttctatttcggattttagaatttccaaattcaccagcgatttatcggttttggtgaaatccaaggatttattaatgtccacaaatgccatttgttttgtctgtggattgtatttgaaaatggaaacgatgtagttagatagatgcgctgcgaagtttcctattagggttccgcgcttcacgtcacccagcatacttgaatcaccatcctttaaaaaaaatgataagatatcaacatggagtatatcatactcgaattttaattcttctactgactcactgacattttcacaaatactacaatacggtttaccgaaaataatcagtacgttcttcatttatgggtatcaaaaacttaaaatcgttactgctggaaaataaatcactgacgatattagatgataatttatacaaagtatacaatggaatatttgtggatacaatgagtatttatatagccgtcgccaattgtgtcagaaacttagaagagttaactacggtattcataaaatacgtaaacggatgggtaaaaaagggagggcatgtaaccctttttatcgatagaggaagtataaaaattaaacaagacgttagagacaagagacgtaaatattctaaattaaccaaggacagaaaaatgttagaattagaaaagtgtacatccgaaatacaaaatgttaccggatttatggaagaagaaataaaggcagaaatgcaattaaaaatcgataaactcacatttcaaatatatttatctgattctgataacataaaaatatcattgaatgagatactaacacatttcaacaataatgagaatgttacattattttattgtgatgaacgagacgcagaattcgttatgtgtctcgaggctaaaacacatttctctaccacaggagaatggccgttgataataagtaccgatcaggatactatgctatttgcatctgctgataatcatcctaagatgataaaaaacttaactcaactgtttaaatttgttccctcggcagaggataactatttagcaaaattaacggcgttagtgaatggatgtgatttctttcctggactctatggggcatctataacacccaccaacttaaacaaaatacaattgtttagtgattttacaatcgataatatagtcactagtttggcaattaaaaattattatagaaagactaactctaccgtagacgtgcgtaatattgttacgtttataaacgattacgctaatttagacgatgtctactcgtatattcctccttgtcaatgcactgttcaagaatttatattttccgcattagatgaaaaatggaatgaatttaaatcatcttatttagaaagcgtgccgttaccctgccaattaatgtacgcgttagaaccacgcaaggagattgatgtttcagaagttaaaactttatcatcttatatagatttcgaaaatactaaatcagatatcgatgttataaaatctatatcctcgatcttcggatattctaacgaaaactgtaacacgatagtattcggcatctataaggataatttactactgagtataaataattcattttactttaacgatagtctgttaataaccaatactaaaagtgataatataataaatataggttactagattaaaaatggtgttccaactcgtgtgctctacatgcggtaaagatatttctcacgaacgatataaattgattatacgaaaaaaatcattaaaggatgtactcgtcagtgtaaagaacgaatgttgtaggttaaaattatctacacaaatagaacctcaacgtaacttaacagtgcaacctctattggatataaactaatatggatccggttaattttatcaagacatatgcgcctagaggttctattatttttattaattataccatgtcattaacaagtcatttgaatccatcgatagaaaaacatgtgggtatttattatggtacgttattatcggaacacttggtagttgaatctacctatagaaaaggagttcgaatagtcccattggatagtttttttgaaggatatcttagtgcaaaagtatacatgttagagaatattcaagttatgaaaatagcagctgatacgtcattaactttattgggtattccgtatggatttggtcatgatagaatgtattgttttaaattggtagctgactgttataaaaatgccggtattgatacatcgtctaaacgaatattgggcaaagatatttttctgagccaaaacttcacagacgataatagatggataaagatatatgattctaataatttaacattttggcaaattgattaccttaaagggtgagttaatatgcataactactcctccgttgttttttccctcgttctttttcttaacgttgtttgccatcactctcataatgtaaagatattctaaaatggtaaacttttgcatatcggacgcagaaattggtataaatgttgtaattgtattatttcccgtcaatggactagtcacagctccatcagttttatatcctttagagtatttctcactcgtgtctaacattctagagcattccatgatctgtttatcgttgatattggccggaaagatagattttttattttttattatattactattggcaattgtagatataacttctggtaaatatttttctaccttttcaatctcttctattttcaagccggctatatattctgctatattgttgctagtatcaataccttttctggctaagaagtcatatgtggtattcactatatcagttttaactggtagttccattagcctttccacttctgcagaataatcagaaattggttctttaccagaaaatccagctactataataggctcaccgatgatcattggcaaaatcctatattgtaccagattaatgagagcatatttcatttccaataattctgctagttcttgagacattgatttatttgatgaatctagttggttctctagatactctaccatttctgccgcatacaataacttgttagataaaatcagggttatcaaagtgtttagcgtggctagaatagtgggcttgcatgtattaaagaatgcggtagtatgagtaaaccgttttaacgaattatatagtctccagaaatctgtggcgttacatacatgagccgaatgacatcgaagattgtccaatatttttaatagctgctctttgtccattatttctatatttgactcgcaacaattgtagataccattaatcaccgattcctttttcgatgccggacaatagcacaattgtttagctttggactctatgtattcagaattaatagatatatctctcaatacagattgcactatacattttgaaactatgtcaaaaattgtagaacgacgctgttctgcagccatttaactttaaataatttacaaaaatttaaaatgagcatccgtataaaaatcgataaactgcgccaaattgtggcatatttttcagagttcagtgaagaagtgtctataaatgtagactcgacggatgagttaatgtatatttttgccgccttgggcggatctgtaaacatttgggcaattatacctctaagtgcatcagtgttttaccgaggagccgaaaatattgtgtttaatcttcctgtgtccaaggtaaaatcgtgtttgtgtagttttcacaatgatgccatcatagatatagaacctgatctggaaaataatctagtaaaactttctagttatcatgtagtaagtgtcgattgtaacaaggaactgatgcctattaggacagatactactatttgtctaagtatagatcaaaagaaatcttacgtgtttaattttcacaagtatgaagaaaaatgttgtggtagaaccgtcattcatctagaatggttgttgggctttatcaagtgtattagtcagcatcagcatctggctattatgtttaaagatgacaatattattatgaagactcctggtaatactgatgcgttttccagggaatattctatgactgaatgttctcaagaactacaaaagttttctttcaaaatagctatctcgtctctcaacaaactacgaggattcaaaaagagagtcaatgtttttgaaactagaatcgtaatggataatgacgataacattttaggaatgttgttttcggatagagttcaatcctttaagatcaacatctttatggcgtttttagattaatactttcaatgagataaatatgggtggcggagtaagtgttgagctccctaaacgggatccgcctccgggagtacccactgatgagatgttattaaacgtggataaaatgcatgacgtgatagctcccgctaagcttttagaatatgtgcatataggaccactagcaaaagataaagaggataaagtaaagaaaagatatccagagtttagattagtcaacacaggacccggtggtctttcggcattgttaagacaatcgtataatggaaccgcacccaattgctgtcgcacttttaatcgtactcattattggaagaaggatggaaagatatcagataagtatgaagagggtgcagtattagaatcgtgttggccagacgttcacgacactggaaaatgcgatgttgatttattcgactggtgtcagggggatacgttcgatagaaacatatgccatcagtggatcggttcagcctttaataggagtaatagaactgtagagggtcaacaatcgttaataaatctgtataataagatgcaaacattatgtagtaaagatgctagtgtaccaatatgcgaatcatttttgcattatttacgcgcacacaatacagaagatagcaaagagatgatcgattatattctaagacaacagtctgcggactttaaacagaaatatatgagatgtagttatcccactagagataagttagaagagtcattaaaatatgcggaacctcgagaatgttgggatccagagtgttcgaatgccaatgttaatttcttactaacacgtaattataataatttaggactttgcaatattgtacgatgtaataccagcgtgaacaacttacagatggataaaacttcctcattaagattgtcatgtggattaagcaatagtgatagattttctactgttcccgtcaatagagcaaaagtagttcaacataatattaaacactcgttcgacctaaaattgcatttgatcagtttattatctctcttggtaatatggatactaattgtagctatttaaatgggtgccgcggcaagcatacagacgacggtgaatacactcagcgaacgtatctcgtctaaattagaacaagaagcgaacgctagtgctcaaacaaaatgtgatatagaaatcggaaatttttatatccgacaaaaccatggatgtaacctcactgttaaaaatatgtgctctgcggacgcggatgctcagttggatgctgtgttatcagccgctacagaaacatatagtggattaacaccggaacaaaaagcatacgtgccagctatgtttactgctgcgttaaacattcagacgagtgtaaacactgttgttagagattttgaaaattatgtgaaacagacttgtaattctagcgcggtcgtcgataacaaattaaagatacaaaacgtaatcatagatgaatgttacggagccccaggatctccaacaaatttggaatttattaatacaggatctagcaaaggaaattgtgccattaaagcgttgatgcaattgacgactaaggccactactcaaatagcacctagacaagttgctggtacaggagttcagttttatatgattgttatcggtgttataatattggcagcgttgtttatgtactatgccaagcgtatgttgttcacatccaccaatgataaaatcaaacttattttagccaataaggaaaacgtccattggactacttacatggacacattctttagaacttctccgatggttattgctaccacggatatgcaaaactgaaaatatattgataatattttaatagattaacatggaagttatcgctgatcgtctagacgatatagtgaaacaaaatatagcggatgaaaaatttgtagattttgttatacacggtctagagcatcaatgtcctgctatacttcgaccattaattaggttgtttattgatatactattatttgttatagtaatttatatttttacggtacgtctagtaagtagaaattatcaaatgttgttggtggtgctagtcatcacattaactattttttattactttatactataatagtactagactgacttctaacaaacatctcacctgccataaataaatgcttgatattaaagtcttctatttctaacactattccatctgtggaaaataatactctgacattatcgctaattgacacatcggtgagtgatatgcctataaagtaataatcttctttgggcacatataccagtgtaccaggttctaacaacctatttactggtgctcctgtagcatactttttctttaccttgagaatatccatcgtttgcttggtcaatagcgatatgtgattttttatcaaccactcaaaaaagtaattggagtgttcatatcctctacgggctattgtctcatggccgtgtatgaaatttaagtaacacgactgtggtagatttgttctatagagccgattgccgcaaatagatagaactaccaatatgtctgtacaaatgttaaacattaattgattaacagaaaaaacaatgttcgttctgggaatagaaaccagatcaaaacaaaattcgttagaatatatgccacgtttatacatggaatataaaataactacagtttgaaaaataacagtatcatttaaacatttaacttgcggggttaatctcacaactttactgtttttgaactgttcaaaatatagcatcgatccgtgagaaatacgtttagccgcctttaatagaggaaatcccaccgcctttctggatctcaccaacgacgatagttctgaccagcaactcatttcttcatcatccacctgttttaacatataataggcaggagatagatatccgtcattgcaatattccttctcgtaggcacacaatctaatattgataaaatctccattctcttctctgcatttattatcttgtctcggtggctgattaggctgtggtcttggtttaggccttggtctatcgttgttgaatctattttggtcattaaatctttcatttcttcctggtatatttctatcacctcgtttggttggatttttgtctatattatcgtttgtaacatcggtacgggtattcatttatcacaaaaaaaacttctctaaatgagtctactgctagaaaacctcatcgaagaagataccatattttttgcaggaagtatatctgagtatgatgatttacaaatggttattgccggcgcaaaatccaaatttccaagatctatgctttctatttttaatatagtacctagaacgatgtcaaaatatgagttggagttgattcataacgaaaatatcacaggagcaatgtttaccacaatgtataatataagaaacaatttgggtctaggagatgataaactaactattgaagccattgaaaactatttcttggatcctaacaatgaagttatgcctcttattattaataatacggatatgactgccgtcattcctaaaaaaagtggtaggagaaagaataagaacatggttatcttccgtcaaggatcatcacctatcttgtgcattttcgaaactcgtaaaaagattaatatttataaagaaaatatggaatccgcgtcgactgagtatacacctatcggagacaacaaggctttgatatctaaatatgcgggaattaatgtcctgaatgtgtattctccttccacatccataagattgaatgccatttacggattcaccaataaaaataaactagagaaacttagtactaataaggaactagaatcgtatagttctagccctcttcaagaacccattaggttaaatgattttctgggactattggaatgtgttaaaaagaatattcctctaacagatattccgacaaaggattgattactataaatggagaatgttcctaatgtatactttaatcctgtgtttatagagcccacgtttaaacattctttattaagtgtttataaacacagattaatagttttatttgaagtattcgttgtattcattctaatatatgtattttttagatctgaattaaatatgttcttcatgcctaaacgaaaaatacccgatcctattgatagattacgacgtgctaatctagcgtgtgaagacgataaattaatgatctatggattaccatggatgacaactcaaacatctgcgttatcaataaatagtaaaccgatagtgtataaagattgtgcaaagcttttgcgatcaataaatggatcacaaccagtatctcttaacgatgttcttcgcagatgatgattcattttttaagtatttggctagtcaagatgatgaatcttcattatctgatatattgcaaatcactcaatatctagactttctgttattattattgatccaatcaaaaaataaattagaagctgtgggtcattgttatgaatctctttcagaggaatacagacaattgacaaaattcacagactttcaagattttaaaaaactgtttaacaaggtccctattgttacagatggaagggtcaaacttaataaaggatatttgttcgactttgtgattagtttgatgcgattcaaaaaagaatcctctctagctaccaccgcaatagatcctgttagatacatagatcctcgtcgcaatatcgcattttctaacgtgatggatatattaaagtcgaataaagtgaacaataattaattctttattgtcatcatgaacggcggacatattcagttgataatcggccccatgttttcaggtaaaagtacagaattaattagacgagttagacgttatcaaatagctcaatataaatgcgtgactataaaatattctaacgataatagatacggaacgggactatggacgcatgataagaataattttgaagcattggaagcaactaaactatgtgatgtcttggaatcaattacagatttctccgtgataggtatcgatgaaggacagttctttccagacattgttgaattagatcgataaaaattaattaattacccgggtaccaggcctagatctgtcgagatccggtggtggtgcaaatcaaagaactgctcctcagtggatgttgcctttacttctaggcctgtacggaagtgttacttctgctctaaaagctgctgcagggggggggggggggtgggggggccggttagggccgccatcccctcagagcgtcgggatatcgggtggcggctcgggacggaggacgcgctagtgttcttctgtgtggcagttcagaatgatggatcaagctagatcagcattctctaacttgtttggtggagaaccattgtcatatacccggttcagcctggctcggcaagtagatggcgataacagtcatgtggagatgaaacttgctgtagatgaagaagaaaatgctgacaataacacaaaggccaatgtcacaaaaccaaaaaggtgtagtggaagtatctgctatgggactattgctgtgatcgtctttttcttgattggatttatgattggctacttgggctattgtaaaggggtagaaccaaaaactgagtgtgagagactggcaggaaccgagtctccagtgagggaggagccaggagaggacttccctgcagcacgtcgcttatattgggatgacctgaagagaaagttgtcggagaaactggacagcacagacttcaccagcaccatcaagctgctgaatgaaaattcatatgtccctcgtgaggctggatctcaaaaagatgaaaatcttgcgttgtatgttgaaaatcaatttcgtgaatttaaactcagcaaagtctggcgtgatcaacattttgttaagattcaggtcaaagacagcgctcaaaactcggtgatcatagttgataagaacggtagacttgtttacctggtggagaatcctgggggttatgtggcgtatagtaaggctgcaacagttactggtaaactggtccatgctaattttggtactaaaaaagattttgaggatttatacactcctgtgaatggatctatagtgattgtcagagcagggaaaatcacctttgcagaaaaggttgcaaatgctgaaagcttaaatgcaattggtgtgttgatatacatggaccagactaaatttcccattgttaacgcagaactttcattctttggacatgctcatctggggacaggtgacccttacacacctggattcccttccttcaatcacactcagtttccaccatctcggtcatcaggattgcctaatatacctgtccagacaatctccagagctgctgcagaaaagctgtttgggaatatggaaggagactgtccctctgactggaaaacagactctacatgtaggatggtaacctcagaaagcaagaatgtgaagctcactgtgagcaatgtgctgaaagagataaaaattcttaacatctttggagttattaaaggctttgtagaaccagatcactatgttgtagttggggcccagagagatgcatggggccctggagctgcaaaatccggtgtaggcacagctctcctattgaaacttgcccagatgttctcagatatggtcttaaaagatgggtttcagcccagcagaagcattatctttgccagttggagtgctggagactttggatcggttggtgccactgaatggctagagggatacctttcgtccctgcatttaaaggctttcacttatattaatctggataaagcggttcttggtaccagcaacttcaaggtttctgccagcccactgttgtatacgcttattgagaaaacaatgcaaaatgtgaagcatccggttactgggcaatttctatatcaggacagcaactgggccagcaaagttgagaaactcactttagacaatgctgctttccctttccttgcatattctggaatcccagcagtttctttctgtttttgcgaggacacagattatccttatttgggtaccaccatggacacctataaggaactgattgagaggattcctgagttgaacaaagtggcacgagcagctgcagaggtcgctggtcagttcgtgattaaactaacccatgatgttgaattgaacctggactatgagaggtacaacagccaactgctttcatttgtgagggatctgaaccaatacagagcagacataaaggaaatgggcctgagtttacagtggctgtattctgctcgtggagacttcttccgtgctacttccagactaacaacagatttcgggaatgctgagaaaacagacagatttgtcatgaagaaactcaatgatcgtgtcatgagagtggagtatcacttcctctctccctacgtatctccaaaagagtctcctttccgacatgtcttctggggctccggctctcacacgctgccagctttactggagaacttgaaactgcgtaaacaaaataacggtgcttttaatgaaacgctgttcagaaaccagttggctctagctacttggactattcagggagctgcaaatgccctctctggtgacgtttgggacattgacaatgagttttaaatgtgatacccatagcttccatgagaacagcagggtagtctggtttctagacttgtgctgatcgtgctaaattttcagtagggctacaaaacctgatgttaaaattccatcccatcatcttggtactactagatgtctttaggcagcagcttttaatacagggtagataacctgtacttcaagttaaagtgaataaccacttaaaaaatgtccatgatggaatattcccctatctctagaattttaagtgctttgtaatgggaactgcctctttcctgttgttgttaatgaaaatgtcagaaaccagttatgtgaatgatctctctgaatcctaagggctggtctctgctgaaggttgtaagtggtcgcttactttgagtgatcctccaacttcatttgatgctaaataggagataccaggttgaaagaccttctccaaatgagatctaagcctttccataaggaatgtagctggtttcctcattcctgaaagaaacagttaactttcagaagagatgggcttgttttcttgccaatgaggtctgaaatggaggtccttctgctggataaaatgaggttcaactgttgattgcaggaataaggccttaatatgttaacctcagtgtcatttatgaaaagaggggaccagaagccaaagacttagtatattttcttttcctctgtcccttcccccataagcctccatttagttctttgttatttttgtttcttccaaagcacattgaaagagaaccagtttcaggtgtttagttgcagactcagtttgtcagactttaaagaataatatgctgccaaattttggccaaagtgttaatcttaggggagagctttctgtccttttggcactgagatatttattgtttatttatcagtgacagagttcactataaatggtgtttttttaatagaatataattatcggaagcagtgccttccataattatgacagttatactgtcggttttttttaaataaaagcagcatctgctaataaaacccaacagatactggaagttttgcatttatggtcaacacttaagggttttagaaaacagccgtcagccaaatgtaattgaataaagttgaagctaagatttagagatgaattaaatttaattaggggttgctaagaagcgagcactgaccagataagaatgctggttttcctaaatgcagtgaattgtgaccaagttataaatcaatgtcacttaaaggctgtggtagtactcctgcaaaattttatagctcagtttatccaaggtgtaactctaattcccattttgcaaaatttccagtacctttgtcacaatcctaacacattatcgggagcagtatcttccataatgtataaagaacaaggtagtttttacctaccacagtgtctgtatcggagacagtgatctccatatgttacactaagggtgtaagtaattatcgggaacagtgtttcccataattttcttcatgcaatgacatcttcaaagcttgaagatcgttagtatctaacatgtatcccaactcctataattccctatcttttagttttagttgcagaaacattttgtggtcattaagcattgggtgggtaaattcaaccactgtaaaatgaaattactacaaaatttgaaatttagcttgggtttttgttacctttatggtttctccaggtcctctacttaatgagatagtagcatacatttataatgtttgctattgacaagtcattttaactttatcacattatttgcatgttacctcctataaacttagtgcggacaagttttaatccagaattgaccttttgacttaaagcagagggactttgtatagaaggtttgggggctgtggggaaggagagtcccctgaaggtctgacacgtctgcctacccattcgtggtgatcaattaaatgtaggtatgaataagttcgaagctccgtgagtgaaccatcattataaacgtgatgatcagctgtttgtcatagggcagttggaaacggcctcctagggaaaagttcatagggtctcttcaggttcttagtgtcacttacctagatttacagcctcacttgaatgtgtcactactcacagtctctttaatcttcagttttatctttaatctcctcttttatcttggactgacatttagcgtagctaagtgaaaaggtcatagctgagattcctggttcgggtgttacgcacacgtacttaaatgaaagcatgtggcatgttcatcgtataacacaatatgaatacagggcatgcattttgcagcagtgagtctcttcagaaaacccttttctacagttagggttgagttacttcctatcaagccagtacgtgctaacaggctcaatattcctgaatgaaatatcagactagtgacaagctcctggtcttgagatgtcttctcgttaaggagatgggccttttggaggtaaaggataaaatgaatgagttctgtcatgattcactattctagaacttgcatgacctttactgtgttagctctttgaatgttcttgaaattttagactttctttgtaaacaaatgatatgtccttatcattgtataaaagctgttatgtgcaacagtgtggagattccttgtctgatttaataaaatacttaaacactgaaaaaaaaaaaaaaaaaaaaaaaaaaaaaaaaaaaaaaaaaaaaaaaaaaaaaaaaaaaaaaaaaaaaaaaaaaaaaaaaagtaccttctgaggcggaaagaaccagccggatctcgacttcgagcttatttatattccaaaaaaaaaaaataaaatttcaatttttaagctttcactaattccaaacccacccgctttttatagtaagtttttcacccataaataataaatacaataattaatttctcgtaaaagtagaaaatatattctaatttattgcacggtaaggaagtagatcataactcgagcatgggagatcccgtcgttttacaacgtcgtgactgggaaaaccctggcgttacccaacttaatcgccttgcagcacatccccctttcgccagctggcgtaatagcgaagaggcccgcaccgatcgcccttcccaacagttgcgcagcctgaatggcgaatggcgctttgcctggtttccggcaccagaagcggtgccggaaagctggctggagtgcgatcttcctgaggccgatactgtcgtcgtcccctcaaactggcagatgcacggttacgatgcgcccatctacaccaacgtgacctatcccattacggtcaatccgccgtttgttcccacggagaatccgacgggttgttactcgctcacatttaatgttgatgaaagctggctacaggaaggccagacgcgaattatttttgatggcgttaactcggcgtttcatctgtggtgcaacgggcgctgggtcggttacggccaggacagtcgtttgccgtctgaatttgacctgagcgcatttttacgcgccggagaaaaccgcctcgcggtgatggtgctgcgctggagtgacggcagttatctggaagatcaggatatgtggcggatgagcggcattttccgtgacgtctcgttgctgcataaaccgactacacaaatcagcgatttccatgttgccactcgctttaatgatgatttcagccgcgctgtactggaggctgaagttcagatgtgcggcgagttgcgtgactacctacgggtaacagtttctttatggcagggtgaaacgcaggtcgccagcggcaccgcgcctttcggcggtgaaattatcgatgagcgtggtggttatgccgatcgcgtcacactacgtctgaacgtcgaaaacccgaaactgtggagcgccgaaatcccgaatctctatcgtgcggtggttgaactgcacaccgccgacggcacgctgattgaagcagaagcctgcgatgtcggtttccgcgaggtgcggattgaaaatggtctgctgctgctgaacggcaagccgttgctgattcgaggcgttaaccgtcacgagcatcatcctctgcatggtcaggtcatggatgagcagacgatggtgcaggatatcctgctgatgaagcagaacaactttaacgccgtgcgctgttcgcattatccgaaccatccgctgtggtacacgctgtgcgaccgctacggcctgtatgtggtggatgaagccaatattgaaacccacggcatggtgccaatgaatcgtctgaccgatgatccgcgctggctaccggcgatgagcgaacgcgtaacgcgaatggtgcagcgcgatcgtaatcacccgagtgtgatcatctggtcgctggggaatgaatcaggccacggcgctaatcacgacgcgctgtatcgctggatcaaatctgtcgatccttcccgcccggtgcagtatgaaggcggcggagccgacaccacggccaccgatattatttgcccgatgtacgcgcgcgtggatgaagaccagcccttcccggctgtgccgaaatggtccatcaaaaaatggctttcgctacctggagagacgcgcccgctgatcctttgcgaatacgcccacgcgatgggtaacagtcttggcggtttcgctaaatactggcaggcgtttcgtcagtatccccgtttacagggcggcttcgtctgggactgggtggatcagtcgctgattaaatatgatgaaaacggcaacccgtggtcggcttacggcggtgattttggcgatacgccgaacgatcgccagttctgtatgaacggtctggtctttgccgaccgcacgccgcatccagcgctgacggaagcaaaacaccagcagcagtttttccagttccgtttatccgggcaaaccatcgaagtgaccagcgaatacctgttccgtcatagcgataacgagctcctgcactggatggtggcgctggatggtaagccgctggcaagcggtgaagtgcctctggatgtcgctccacaaggtaaacagttgattgaactgcctgaactaccgcagccggagagcgccgggcaactctggctcacagtacgcgtagtgcaaccgaacgcgaccgcatggtcagaagccgggcacatcagcgcctggcagcagtggcgtctggcggaaaacctcagtgtgacgctccccgccgcgtcccacgccatcccgcatctgaccaccagcgaaatggatttttgcatcgagctgggtaataagcgttggcaatttaaccgccagtcaggctttctttcacagatgtggattggcgataaaaaacaactgctgacgccgctgcgcgatcagttcacccgtgcaccgctggataacgacattggcgtaagtgaagcgacccgcattgaccctaacgcctgggtcgaacgctggaaggcggcgggccattaccaggccgaagcagcgttgttgcagtgcacggcagatacacttgctgatgcggtgctgattacgaccgctcacgcgtggcagcatcaggggaaaaccttatttatcagccggaaaacctaccggattgatggtagtggtcaaatggcgattaccgttgatgttgaagtggcgagcgatacaccgcatccggcgcggattggcctgaactgccagctggcgcaggtagcagagcgggtaaactggctcggattagggccgcaagaaaactatcccgaccgccttactgccgcctgttttgaccgctgggatctgccattgtcagacatgtataccccgtacgtcttcccgagcgaaaacggtctgcgctgcgggacgcgcgaattgaattatggcccacaccagtggcgcggcgacttccagttcaacatcagccgctacagtcaacagcaactgatggaaaccagccatcgccatctgctgcacgcggaagaaggcacatggctgaatatcgacggtttccatatggggattggtggcgacgactcctggagcccgtcagtatcggcggaattccagctgagcgccggtcgctaccattaccagttggtctggtgtcaaaaataataataaccgggcaggggggatccaattctgtgagcgtatggcaaacgaaggaaaaatagttatagtagccgcactcgatgggacatttcaacgtaaaccgtttaataatattttgaatcttattccattatctgaaatggtggtaaaactaactgctgtgtgtatgaaatgctttaaggaggcttccttttctaaacgattgggtgaggaaaccgagatagaaataataggaggtaatgatatgtatcaatcggtgtgtagaaagtgttacatcgactcataatattatattttttatctaaaaaactaaaaataaacattgattaaattttaatataatacttaaaaatggatgttgtgtcgttagataaaccgtttatgtattttgaggaaattgataatgagttagattacgaaccagaaagtgcaaatgaggtcgcaaaaaaactgccgtatcaaggacagttaaaactattactaggagaattattttttcttagtaagttacagcgacacggtatattagatggtgccaccgtagtgtatataggatctgctcccggtacacatatacgttatttgagagatcatttctataatttaggagtgatcatcaaatggatgctaattgacggccgccatcatgatcctattttaaatggattgcgtgatgtgactctagtgactcggttcgttgatgaggaatatctacgatccatcaaaaaacaactgcatccttctaagattattttaatttctgatgtgagatccaaacgaggaggaaatgaacctagtacggcggatttactaagtaattacgctctacaaaatgtcatgattagtattttaaaccccgtggcgtctagtcttaaatggagatgcccgtttccagatcaatggatcaaggacttttatatcccacacggtaataaaatgttacaaccttttgctccttcatattcagctgaaatgagattattaagtatttataccggtgagaacatgagactgactcgagttaccaaattagacgctgtaaattatgaaaaaaagatgtactaccttaataagatcgtccgtaacaaagtagttgttaactttgattatcctaatcaggaatatgactattttcacatgtactttatgctgaggaccgtgtactgcaataaaacatttcctactactaaagcaaaggtactatttctacaacaatctatatttcgtttcttaaatattccaacaacatcaactgaaaaagttagtcatgaaccaatacaacgtaaaatatctagcaaaaattctatgtctaaaaacagaaatagcaagagatccgtacgcggtaataaatagaaacgtactactgagatatactaccgatatagagtataatgatttagttactttaataaccgttagacataaaattgattctatgaaaactgtgtttcaggtatttaacgaatcatccataaattatactccggttgatgatgattatggagaaccaatcattataacatcgtatcttcaaaaaggtcataacaagtttcctgtaaattttctatacatagatgtggtaatatctgacttatttcctagctttgttagactagatactacagaaactaatatagttaatagtgtactacaaacaggcgatggtaaaaagactcttcgtcttcccaaaatgttagagacggaaatagttgtcaagattctctatcgccctaatataccattaaaaattgttagatttttccgcaataacatggtaactggagtagagatagccgatagatctgttatttcagtcgctgattaatcaattagtagagatgagataagaacattataataatcaataatatatcttatatcttatatcttatatcttatatcttgtttagaaaaatgctaatattaaaatagctaacgctagtaatccaatcggaagccatttgatatctataatagggtatctaatttcctgatttaaatagcggacagctatattctcggtagctactcgtttggaatcacaaacattatttacatctaatttactatctgtaatggaaacgtttcccaatgaaatggtacaatccgatacattgcattttgttatatttttttttaaagaggctggtaacaacgcatcgcttcgtttacatggctcgtaccaacaataatagggtaatcttgtatctattcctatccgtactatgcttttatcaggataaatacatttacatcgtatatcgtctttgttagcatcacagaatgcataaatttgttcgtccgtcatgataaaaatttaaagtgtaaatataactattatttttatagttgtaataaaaagggaaatttgattgtatactttcggttctttaaaagaaactgacttgataaaaatggctgtaatctctaaggttacgtatagtctatatgatcaaaaagagattaatgctacagatattatcattagtcatgttaaaaatgacgacgatatcggtaccgttaaagatggtagactaggtgctatggatggggcattatgtaagacttgtgggaaaacggaattggaatgtttcggtcactggggtaaagtaagtatttataaaactcatatagttaagcctgaatttatttcagaaattattcgtttactgaatcatatatgtattcactgcggattattgcgttcacgagaaccgtattccgacgatattaacctaaaagagttatcgggacacgctcttaggagattaaaggataaaatattatccaagaaaaagtcatgttggaacagtgaatgtatgcaaccgtatcaaaaaattactttttcaaagaaaaaggtttgtttcgtcaacaagttggatgatattaacgttcctaattctctcatctatcaaaagttaatttctattcatgaaaagttttggccattattagaaattcatcaatatccagctaacttattttatacagactactttcccatccctccgttgattattagaccggctattagtttttggatagatagtatacccaaagagaccaatgaattaacttacttattaggtatgatcgttaagaattgtaacttgaatgctgatgaacaggttatccagaaggcggtaatagaatacgatgatattaaaattatttctaataacactaccagtatcaatttatcatatattacatccggcaaaaataatatgattagaagttatatcgtcgcccgacgaaaagatcagaccgctagatctgtaattggtcccagtacatctatcaccgttaatgaggtaggaatgcccgcatatattagaaatacacttacagaaaagatatttgttaatgcctttacagtggataaagttaaacaactattagcgtcaaaccaagttaaattttactttaataaacgattaaaccaattaacaagaatacgccaaggaaagtttattaaaaataaaatacatttattgcctggtgattgggtagaagtagctgttcaagaatatacaagtattatttttggaagacagccgtctctacatagatacaacgtcatcgcttcatctatcagagctaccgaaggagatactatcaaaatatctcccggaattgccaactctcaaaatgctgatttcgacggggatgaggaatggatgatattagaacaaaatcctaaagctgtaattgaacaaagtattcttatgtatccgacgacgttactcaaacacgatattcatggagcccccgtttatggatctattcaagatgaaatcgtagcagcgtattcattgtttaggatacaagatctttgtttagatgaagtattgaacatcttggggaaatatggaagagagttcgatcctaaaggtaaatgtaaattcagcggtaaagatatctatacttacttgataggtgaaaagattaattatccgggtctcttaaaggatggtgaaattattgcaaacgacgtagatagtaattttgttgtggctatgaggcatctgtcattggctggactcttatccgatcataagtcgaacgtggaaggtatcaactttattatcaagtcatcttatgtttttaagagatatctatctatttacggttttggggtgacattcaaagatctgagaccaaattcgacgttcactaataaattggaggccatcaacgtagaaaaaatagaacttatcaaagaagcatacgccaaatatctcaacgatgtaagagacgggaaaatagttccattatctaaagctttagaggcggactatgtggaatccatgttatccaacttgacaaatcttaatatccgagagatagaagaacatatgagacaaacgctgatagatgatccagataataacctcctgaaaatggccaaagcgggttataaagtaaatcccacagaactaatgtatattctaggtacgtatggacaacaaaggattgatggtgaaccagcagagactcgagtattgggtagagttttaccttactatcttccagactctaaggatccagaaggaagaggttacattcttaattctttaacaaaaggattaacgggttctcaatattacttttcgatgctggttgccagatctcaatctactgatatcgtctgtgaaacatcacgtaccggaacactggctagaaaaatcattaaaaagatggaggatatggtggtcgacggatacggacaagtagttataggtaatacgctcatcaagtacgccgccaattataccaaaattctaggctcagtatgtaaacctgtagatcttatctatccagatgagtccatgacttggtatttggaaattagtgctctgtggaataaaataaaacagggattcgtttactctcagaaacagaaacttgcaaagaagacattggcgccgtttaatttcctagtattcgtcaaacccaccactgaggataatgctattaaggttaaggatctgtacgatatgattcataacgtcattgatgatgtgagagagaaatacttctttacggtatctaatatagattttatggagtatatattcttgacgcatcttaatccttctagaattagaattacaaaagaaacggctatcactatctttgaaaagttctatgaaaaactcaattatactctaggtggtggaactcctattggaattatttctgcacaggtattgtctgagaagtttacacaacaagccctgtccagttttcacactactgaaaaaagtggtgccgtcaaacaaaaacttggtttcaacgagtttaataacttgactaatttgagtaagaataagaccgaaattatcactctggtatccgatgatatctctaaacttcaatctgttaagattaatttcgaatttgtatgtttgggagaattaaatccaaacatcactcttcgaaaagaaacagataaatatgtagtagatataatagtcaatagattatacatcaagagagcagaaataaccgaattagtcgtcgaatatatgattgaacgatttatctcctttagcgtcattgtaaaggaatggggtatggagacattcattgaggacgaggataatattagatttactgtctacctaaatttcgttgaaccggaagaattgaatcttagtaagtttatgatggttcttccgggggcagccaacaagggaaagattagtaaattcaagattcctatctctgattatacgggatatgacgacttcaatcaaacaaaaaagctcaataagatgactgtagaactcatgaatctaaaagaattgggttctttcgatttggaaaacgtcaacgtgtatcctggagtatggaatacatacgatatcttcggtatcgaggccgctcgtgaatacttgtgcgaagccatgttaaacacctatggagaagggttcgattatctgtatcagccttgtgatcttctcgctagtttactatgtgctagttacgaaccagaatcagtgaataaattcaagttcggcgcagctagtactcttaagagagctacgttcggagacaataaagcattgttaaacgcggctcttcataaaaagtcagaacctattaacgataatagtagctgccacttttttagcaaggtccctaatataggaactggatattacaaatactttatcgacttgggtcttctcatgagaatggaaaggaaactatctgataagatatcttctcaaaagatcaaggaaatggaagaaacagaagacttttaattcttatcaataacatatttttctatgatctgtcttttaaacgatggattttccacaaatgcgcctctcaagtccctcatagaatgatacacgtataaaaaatatagcataggcaatgactccttatttttagacattagatatgccaaaatcatagccccgcttctatttactcccgcagcacaatgaaccaacacgggctcgtttcgttgatcacatttagataaaaaggcggttacgtcgtcaaaatatttactaatatcggtagttgtatcatctaccaacggtatatgaataatattaatattagagttaggtaatgtatatttatccatcgtcaaatttaaaacatatttgaacttaacttcagatgatggtgcatccatagcatttttataatttcccaaatacacattattggttacccttgtcattatagtgggagatttggctttgtgcatatctccagttgaacgtagtagtaagtatttatacaaacttttcttatccatttataacgtacaaatggataaaactactttatcggtaaacgcgtgtaatttagaatacgttagagaaaaggctatagtaggcgtacaagcagccaaaacatcaacacttatattctttgttattatattggcaattagtgcgctattactctggtttcagacgtctgataatccagtctttaatgaattaacgagatatatgcgaattaaaaatacggttaacgattggaaatcattaacggatagcaaaacaaaattagaaagtgatagaggtagacttctagccgctggtaaggatgatatatttgaattcaaatgtgtggatttcggcgcctattttatagctatgcgattggataagaaaacatatctgccgcaagctattaggcgaggtactggagacgcgtggatggttaaaaaggcggcaaaggtcgatccatctgctcaacaattttgtcagtatttgataaaacacaagtctaataatgttattacttgtggtaatgagatgttaaatgaattaggttatagcggttattttatgtcaccgcattggtgttccgattttagtaatatggaatagtgttagataaatgcggtaacgaatgttcctgtaaggaaccataacagcttagatttaacgttaaagatgagcataaacataataaacaaaattacaatcaaacttataacattaatatcaaacaatccaaaaaatgaaatcagtggagtagtaaacgcgtacataactcctggataacgtttagcagctgccgttcctattctagaccaaaaattcggtttcatgttttcgaaacggtattctgcaacaagtcgaggatcgtgttctacatatttggcggcattatccagtatctgcctattgatcttcatttcgttttcgattctggctatttcaaaataaaatcccgatgatagacctccagactttataatttcatctacgatgttcagcgccgtagtaactctaataatataggctgataagctaacatcataccctcctgtatatgtgaatatggcatgatttttgtccattacaagctcggttttaactttattgcctgtaataatttctctcatctgtaggatatctatttttttgtcatgcattgccttcaagacgggacgaagaaacgtaatatcctcaataacgttatcgttttctacaataactacatattctacctttttattttctaactcggtaaaaaaattagaatcccatagggctaaatgtctagcgatatttcttttcgtttcctctgtacacatagtgttacaaaaccctgaaaagaagtgagtatacttgtcatcatttctaatgtttcctccagtccactgtataaacgcataatccttgtaatgatctggatcatccttgactaccacaacatttcttttttctggcataacttcgttgtcctttacatcatcgaacttctgatcattaatatgctcatgaacattaggaaatgtttctgatggaggtctatcaataactggcacaacaataacaggagttttcaccgccgccatttagttattgaaattaatcatatacaactctttaatacgagttatattttcgtctatccattgtttcacattgacatatttcgacaaaaagatataaaatgcgtattccaatgcttctctgtttaatgaattactaaaatatacaaacacgtcactgtctggcaataaatgatatcttagaatattgtaacaatttattttgtattgcacatgttcgtgatctatgagttcttcttcgaatggcataggatctccgaatctgaaaacgtataaataggagttagaataataatatttgagagtattggtaatatataaactctttagcggtataattagtttttttctctcaatttctatttttagatgtgatggaaaaatgactaattttgtagcattagtatcatgaactctaatcaaaatcttaatatcttcgtcacacgttagctctttgaagtttttaagagatgcatcagttggttctacagatggagtaggtgcaacaattttttgttctacacatgtatgtactggagccattgttttaactataatggtgcttgtatcgaaaaactttaatgcagatagcggaagctcttcgccgcgactttctacgtcgtaattgggttctaacgccgatctctgaatggatactagttttctaagttctaatgtgattctctgaaaatgtaaatccaattcctccggcattatagatgtgtatacatcggtaaataaaactatagtatccaacgatcccttctcgcaaattctagtcttaaccaaaaaatcgtatataaccacggagatggcgtatttaagagtggattcttctaccgttttgttcttggatgtcatataggaaactataaagtccgcactactgttaagaatgattactaacgcaactatatagtttaaattaagcattttggaaacataaaataactctgtagacgatacttgactttcgaataagtttgcagacaaacgaagaaagaacagacctctcttaatttcagaagaaaactttttttcgtattcctgacgtctagagtttatatcaataagaaagttaagaattagtcggttaatgttgtatttcattacccaagtttgagatttcataatattatcaaaagacatgataatattaaagataaagcgctgactatgaacgaaatagctatatggttcgctcaagaatatagtcttgttaaacgtggaaacgataactgtatttttaatcacgtcagcggcatctaaattaaatataggtatatttattccacacactctacaatatgccacaccatcttcataataaataaattcgttagcaaaattattaattttagtgaaatagttagcgtcaactttcatagcttccttcaatctaatttgatgctcacacggtgcgaattccactctaacatcccttttccatgcctcaggttcatcgatctctataatatctagttttttgcgtttcacaaacacaggctcgtctctcgcgatgagatctgtatagtaactatgtaaatgataactagatagaaagatgtagctatatagatgacgatcctttaagagaggtataataactttaccccaatcagatagactgttgttatggtcttcggaaaaagaatttttataaatttttccagtattttccaaatatacgtacttaacatctaaaaaatccttaatgataataggaatggataatccgtctattttataaagaaatacatatcgcacattatacttttttttggaaatgggaataccgatgtgtctacataaatatgcaaagtctaaatattttttagagaatcttagttggtccaaattcttttccaagtacggtaatagatttttcatattgaacggtatcttcttaatctctggttctagttccgcattaaatgatgaaactaagtcactatttttataactaacgattacatcacctctaacatcatcatttaccagaatactgatcttcttttgtcgtaaatacatgtctaatgtgttaaaaaaaagatcatacaagttatacgtcatttcatctgtggtattcttgtcattgaaggataaactcgtactaatctcttctttaacagcctgttcaaatttatatcctatatacgaaaaaatagcaaccagtgtttgatcatccgcgtcaatattctgttctatcgtagtgtataacaatcgtatatcttcttctgtgatagtcgatacgttataaaggttgataacgaaaatatttttatttcgtgaaataaagtcatcgtaggattttggacttatattcgcgtctagtagatatgcttttatttttggaatgatctcaattagaatagtctctttagagtccatttaaagttacaaacaactaggaaattggtttatgatgtataatttttttagtttttatagattctttattctatacttaaaaaatgaaaataaatacaaaggttcttgagggttgtgttaaattgaaagcgagaaataatcataaattatttcattatcgcgatatccgttaagtttgtatcgtaatggcgtggtcaattacgaataaagcggatactagtagcttcacaaagatggctgaaatcagagctcatctaaaaaatagcgctgaaaataaagataaaaacgaggatattttcccggaagatgtaataattccatctactaagcccaaaaccaaacgagccactactcctcgtaaaccagcggctactaaaagatcaaccaaaaaggaggaagtggaagaagaagtagttatagaggaatatcatcaaacaactgaaaaaaattctccatctcctggagtcagcgacattgtagaaagcgtggccgctgtagagctcgatgatagcgacggggatgatgaacctatggtacaagttgaagctggtaaagtaaatcatagtgctagaagcgatctctctgacctaaaggtggctaccgacaatatcgttaaagatcttaagaaaattattactagaatctctgcagtatcgacggttctagaggatgttcaagcagctggtatctctagacaatttacttctatgactaaagctattacaacactatctgatctagtcaccgagggaaaatctaaagttgttcgtaaaaaagttaaaacttgtaagaagtaaatgcgtgcacttttttataaagatggtaaactctttaccgataataattttttaaatcctgtatcagacgataatccagcgtatgaggttttgcaacatgttaaaattcctactcatttaacagatgtagtagtatatgaacaaacgtgggaggaggcgttaactagattaatttttgtgggaagtgattcaaaaggacgtagacaatacttttacggaaaaatgcatgtacagaatcgcaacgctaaaagagatcgtatttttgttagagtatataacgttatgaaacgaattaattgttttataaacaaaaatataaagaaatcgtccacagattccaattatcagttggcggtttttatgttaatggaaactatgttttttattagatttggtaaaatgaaatatcttaaggagaatgaaacagtagggttattaacactaaaaaataaacacatagaaataagtcccgatgaaatagttatcaagtttgtaggaaaggacaaagtttcacatgaatttgttgttcataagtctaatagactatataaaccgctattgaaactgacggatgattctagtcccgaagaatttctgttcaacaaactaagtgaacgaaaggtatacgaatgtatcaaacagtttggtattagaatcaaggatctccgaacgtatggagtcaattatacgtttttatataatttttggacaaatgtaaagtccatatctcctcttccgtcaccaaaaaagttaatagcattaactatcaaacaaactgctgaagtggtaggtcatactccatcaatttcaaaaagagcttatatggcaacgactattttagaaatggtaaaggataaaaattttttagatgtagtatctaaaactacgttcgatgaattcctatctatagtcgtagatcacgttaaatcatctacggatggatgatatagatctttacacaaataattacaagaccgataaatggaaatggataagcgtatgaaatctctcgcaatgacagctttcttcggagagctaagcacattagatattatggcattgataatgtctatatttaaacgccatccaaacaataccattttttcagtggataaggatggtcagtttatgattgatttcgaatacgataattataaggcttctcaatatttggatctgaccctcactccgatatctggagatgaatgcaagactcacgcatcgagtatagccgaacaattggcgtgtgcggatattattaaagaggatattagcgaatatatcaaaactactccccgtcttaaacgatttataaaaaaataccgcaatagatcagatactcgtatcagtcgagatacagaaaagcttaaaatagctctagctaaaggcatagattacgaatatataaaagacgcttgttaataagtaaatgaaaaaaaactagtcgtttataataaaacacgatatggatgccaacgtagtatcattttctactattgcgacgtatatagacgctttagcgaagaatgcttcggaattagaacagaggtctaccgcatacgaaataaataatgaattggaactagtatttattaagccgccattgattactttgacaaatgtagtgaatatctctacgattcaggaatcgtttattcgatttaccgttactaataaggaaggtgttaaaattagaactaagattccattatctaaggtacatggtctagatgtaaaaaatgtacagttagtagatgctatagataacatagtttgggaaaagaaatcattagtgacggaaaatcgtcttcacaaagaatgcttgttgagactatcgacagaggaacgtcatatatttttggattacaagaaatatggatcctctatccgactagaattagtcaatcttattcaagcaaaaacaaaaaactttacgatagactttaagctaaaatattttctaggatccggtgcccagtctaaaagttctttgttgcacgctattaatcatccaaagtcaaggcctaatacatctctggaaatagaattcacacctagagacaatgaaacagttccatatgatgaactaataaaggaattgacgactctctcgcgtcatatatttatggcttctccagagaatgtaattctttctccgcctattaacgcgcctataaaaacctttatgttgcctaaacaagatatagtaggtttggatctggaaaatctatatgccgtaactaagactgacggcattcctataactatcagagttacatcaaacgggttgtattgttattttacacatcttggttatattattagatatcctgttaagagaataatagattccgaagtagtagtctttggtgaggcagttaaggataagaactggaccgtatatctcattaagctaatagagcctgtgaatgcaatcaatgatagactagaagaaagtaagtatgttgaatctaaactagtggatatttgtgatcggatagtattcaagtcaaagaaatacgaaggtccgtttactacaactagtgaagtcgtcgatatgttatctacatatttaccaaagcaaccagaaggtgttattctgttctattcaaagggacctaaatctaacattgattttaaaattaaaaaggaaaatactatagaccaaactgcaaatgtagtatttaggtacatgtccagtgaaccaattatctttggagaatcgtctatctttgtagagtataagaaatttagcaacgataaaggctttcctaaagaatatggttctggtaagattgtgttatataacggcgttaattatctaaataatatctattgtttggaatatattaatacacataatgaagtgggtattaagtccgtggttgtacctattaagtttatagcagaattcttagttaatggagaaatacttaaacctagaattgataaaaccatgaaatatattaactcagaagattattatggaaatcaacataatatcatagtcgaacatttaagagatcaaagcatcaaaataggagatatctttaacgaggataaactatcggatgtgggacatcaatacgccaataatgataaatttagattaaatccagaagttagttattttacgaataaacgaactagaggaccgttgggaattttatcaaactacgtcaagactcttcttatttctatgtattgttccaaaacatttttagacgattccaacaaacgaaaggtattggcgattgattttggaaacggtgctgacctggaaaaatacttttatggagagattgcgttattggtagcgacggatccggatgctgatgctatagctagaggaaatgaaagatacaacaaattaaactctggaattaaaaccaagtactacaaatttgactacattcaggaaactattcgatccgatacatttgtctctagtgtcagagaagtattctattttggaaagtttaatatcatcgactggcagtttgctatccattattcttttcatccgagacattatgctaccgtcatgaataacttatccgaactaactgcttctggaggcaaggtattaatcactaccatggacggagacaaattatcaaaattaacagataaaaagacttttataattcataagaatttacctagtagcgaaaactatatgtctgtagaaaaaatagctgatgatagaatagtggtatataatccatcaacaatgtctactccaatgactgaatacattatcaaaaagaacgatatagtcagagtgtttaacgaatacggatttgttcttgtagataacgttgatttcgctacaattatagaacgaagtaaaaagtttattaatggcgcatctacaatggaagatagaccgtctacaaaaaactttttcgaactaaatagaggagccattaaatgtgaaggtttagatgtcgaagacttacttagttactatgttgtttatgtcttttctaagcggtaaataataatatggtatgggttctgatctcccagttctaaatgcattaaataattccaatagagcgatttttgttcctataggaccttccaactgtggatactctgtattgttaatagatatattaatacttttgtcgggtaacagaggttctacgtcttctaaaaataaaagttttataacatctggcctgttcataaataaaaacttggcgattctatatatactcttattatcaaatctagccattgtcttatagatgtgagctactgtaggtgtaccatttgattttctttctaatactatatatttctctcgaagaagttcttgcacatcatctgggaataaaatactactgttgagtaaatcagttattttttttatatcgatattgatggacatttttatagttaaggataataagtatcccaaagtcgataacgacgataacgaagtatttatacttttaggaaatcacaatgactttatcagattaaaattaacaaaattaaaggagcatgtatttttttctgaatatattgtgactccagatacatatggatctttatgcgtcgaattaaatgggtctagttttcagcacggcggtagatatatagaggtggaggaatttatagatgctggaagacaagttagatggtgttctacatccaatcatatatctaaagatatacccgaagatatgcacactgataaatttgtcatttatgatatttatacgtttgattcgttcaagaataaacgattggtattcgtacaggtacctccgtcgttaggagatgatagtcatttgactaatccgttattgtcaccgtattatcgtaattcagtagccagacaaatggtcaatgatatgatttttaatcaagattcatttttaaaatatttattagaacatctgattagaagccactatagagtttctaaacatataacaatagttagatacaaggataccgaagaattaaatctaacgagaatatgttataatagagataagtttaaggcgtttgtattcgcttggtttaacggcgtttcggaaaatgaaaaggtactagatacgtataaaaaggtatctaatttgatataatgaattcagtgactgtatcacacgcgccatatactattacttatcacgatgattgggaaccagtaatgagtcaattggtagagttttataacgaagtagccagttggctgctacgagacgagacgtcgcctattcctgataagttctttatacagttgaaacaaccgcttagaaataaacgagtatgtgtgtgtggtatagatccgtatccgaaagatggaactggtgtaccgttcgaatcaccaaattttacaaaaaaatcaattaaggagatagcttcatctatatctagattaaccggagtaattgattataaaggttataaccttaatataatagacggggttataccctggaattattacttaagttgtaaattaggagaaacaaaaagtcacgcgatttactgggataagatttccaagttactgctgcagcatataactaaacacgttagtgttctttattgtttgggtaaaacagatttctcgaatatacgggccaagttagaatccccggtaactaccatagtcggatatcatccagcggctagagaccgccaattcgagaaagatagatcatttgaaattatcaacgttttactggaattagacaacaaggcacctataaattgggctcaagggtttatttattaatgctttagtgaaattttaacttgtgttctaaatggatgcggctattagaggtaatgatgttatctttgttcttaagactataggtgtcccgtcagcgtgcagacaaaatgaagatccaagatttgtagaagcatttaaatgcgacgagttagaaagatatattgagaataatccagaatgtacactattcgaaagtcttagggatgaggaagcatactctatagtcagaattttcatggatgtagatttagacgcgtgtctagacgaaatagattatttaacggccattcaagattttattatcgaggtgtcaaactgtgtagctagattcgcgtttacagaatgcggcgccattcatgaaaatgtaataaaatccatgagatctaatttttcattgactaagtctacaaatagagataaaacaagttttcatattatctttttagatacgtataccactatggatacattgatagctatgaaacgaacactattagaattaagtagatcatctgaaaatccactaaccagatcgatagacactgccgtatataggagaaaaacaactcttcgggttgtaggtactaggaaaaatccaaattgcgacactattcatgtaatgcaaccaccgcatgataatatagaagattacctattcacttacgtggatatgaacaacaatagttattacttttctctacaacaacgattggaggatttagttcctgataagttatgggaaccagggtttatttcattcgaagacgctataaaaagagtttcaaaaatattcattaattctataataaactttaatgatctcgatgaaaataattttacaacggtaccactggtcatagattacgtaacaccttgtgcattatgtaaaaaacgatcgcataaacatccgcatcaactatcgttggaaaatggtgctattagaatttacaaaactggtaatccacatagttgtaaagttaaaattgttccgttggatggtaataaactgtttaatattgcacaaagaattttagacactaactctgttttattaaccgaacgaggagaccatatagtttggattaataattcatggaaatttaacagcgaagaacccttgataacaaaactaattttgtcaataagacatcaactacctaaggaatattcaagcgaattactctgtccaagaaaacgaaagactgtagaagctaacatacgagacatgttagtagattcagtggagaccgatacctatccggataaacttccgtttaaaaatggtgtattggacctggtagacggaatgttttactctggagatgatgctaaaaaatatacgtgtactgtatcaaccggatttaaatttgacgatacaaagttcgtcgaagacagtccagaaatggaagagttaatgaatatcattaacgatatccaaccattaacggatgaaaataagaaaaatagagagctatatgaaaaaacattatctagttgtttatgcggtgctaccaaaggatgtttaacattcttttttggagaaactgcaactggaaagtcgacaaccaaacgtttgttaaagtctgctatcggtgacctgtttgttgagacgggtcaaacaattttaacagatgtattggataaaggacctaatccatttatcgctaacatgcatttgaaaagatctgtattctgtagcgaactacctgattttgcctgtagtggatcaaagaaaattagatctgacaatattaaaaagttgacagaaccttgtgtcattggaagaccgtgtttctccaataaaattaataatagaaaccatgcgacaatcattatcgatactaattacaaacctgtttttgataggatagataacgcattaatgagaagaattgccgtcgtgcgattcagaacacacttttctcaaccttctggtagagaggctgctgaaaataatgacgcgtacgataaagtcaaactattagacgaggggttagatggtaaaatacaaaataatatatatagatttgcatttctatacttgttggtgaaatggtacaaaaaatatcatgttcctattatgaaactatatcctacacccgaagagattcctgactttgcattctatctcaaaataggtactctgttggtatctagctctgtaaagcatattccattaatgacggacctctccaaaaagggatatatattgtacgataatgtggtcactcttccgttgactactttccaacagaaaatatccaagtattttaattctagactatttggacacgatatagagagcttcatcaatagacataagaaatttgccaatgttagtgatgaatatctgcaatatatattcatagaggatatttcatctccgtaaatatatgctcatatatttatagaagatatcacatatctaaatgaataccggaatcatagatttatttgataatcatgttgatagtataccaactatattacctcatcagttagctactctagattatctagttagaactatcatagatgagaacagaagcgtgttattgttccatattatgggatcaggtaaaacaataatcgctttgttgttcgccttggtagcttccagatttaaaaaggtttacattctagtgccgaacatcaacatcttaaaaattttcaattataatatgggtgtagctatgaacttgtttaatgacgaattcatagctgagaatatctttattcattccacaacaagtttttattctcttaattataacgataacgtcattaattataacggattatctcgctacaataactctatttttatcgttgatgaggcacataatatctttgggaataatactggagaacttatgaccgtgataaaaaataaaaacaagattccttttttactattgtctggatctcccattactaacacacctaatactctgggtcatattatagatttaatgtccgaagagacgatagattttggtgaaattattagtcgtggtaagaaagtaattcagacacttcttaacgaacgcggtgtgaatgtacttaaggatttgcttaaaggaagaatatcatattacgaaatgcctgataaagatctaccaacgataagatatcacggacgtaagtttctagatactagagtagtatattgtcacatgtctaaacttcaagagagagattatatgattactagacgacagctatgttatcatgaaatgtttgataaaaatatgtataacgtgtcaatggcagtattgggacaacttaatctgatgaataatttagatactttatttcaggaacaggataaggaattgtacccaaatctgaaaataaataatggcgtgttatacggagaagaattggtaacgttaaacattagttccaaatttaaatactttattaatcggatacagacactcaacggaaaacattttatatacttttctaattctacatatggcggattggtaattaaatatatcatgctcagtaatggatattctgaatataatggttctcagggaactaatccacatatgataaacggcaaaccaaaaacatttgctatcgttactagtaaaatgaaatcgtctttagaggatctattagatgtgtataattctcctgaaaacgatgatggtagtcaattgatgtttttgttttcatcaaacattatgtccgaatcctatactctaaaagaggtaaggcatatttggtttatgactatcccagatactttttctcaatacaaccaaattcttggacgatctattagaaaattctcttacgccgatatttctgaaccagttaatgtatatcttttagccgccgtatattccgatttcaatgacgaagtgacgtcattaaacgattacacacaggatgaattaattaatgttttaccatttgacatcaaaaagctgttgtatctaaaatttaagacgaaagaaacgaatagaatatactctattcttcaagagatgtctgaaacgtattctcttccaccacatccatcaattgtaaaagttttattgggagaattggtcagacaatttttttataataattctcgtattaagtataacgataccaagttacttaaaatggttacatcagttataaaaaataaagaagacgctaggaattacatagatgatattgtaaacggtcacttctttgtatcgaataaagtatttgataaatctcttttatacaaatacgaaaacgatattattacagtaccgtttagactttcctacgaaccatttgtttggggagttaactttcgtaaagaatataacgtggtatcttctccataaaactgatgagatatataaagaaataaatgtcgagctttgttaccaatggatacctttccgttacattggaaccacacgagctgacgttagacataaaaactaatattaggaatgccgtatataagacgtatctccatagagaaattagtggtaaaatggccaagaaaatagaaattcgtgaagacgtggaattacctctcggcgaaatagttaataattctgtagttataaacgttccgtgtgtaataacctacgcgtattatcacgttggggatatagtcagaggaacattaaacatcgaagatgaatcaaatgtaactattcaatgtggagatttaatctgtaaactaagtagagattcgggtactgtatcatttagcgattcaaagtactgcttttttcgaaatggtaatgcgtatgacaatggcagcgaagtcactgccgttctaatggaggctcaacaaggtatcgaatctagttttgtttttctcgcgaatatcgtcgactcataaaaaagagaatagcggtaagtataaacacgaatactatggcaataattgcgaatgttttattctcttcgatatatttttgataatatgaaaaacatgtctctctcaaatcggacaaccatctcataaaatagttctcgcgcgctggagaggtagttgccgctcgtataatctctccagaataatatacttgcgtgtcgtcgttcaatttatacggatttctatagttctctgttatataatgcggtttgccctcatgattagacgacgacaatagtgttctaaatttagatagttgatcagaatgaatgtttattggcgttggaaaaattatccatacagcgtctgcagagtggttgatagttgttcctagatatgtaaaataatccaacttactaggcagcaaattgtctagataaaatactgaatcaaacggtgcagacgtattggcggatctaatggaatccaattgattaactatcttttgaaaatatacatttttatgatccaatacttgtaagaatatagaaataatgataagtccatcatcgtgtttttttgcctcttcataagaactatattttttcttattccaatgaacaagattaatctctccagagtatttgtacacatctatcaagtgattggatccataatcgtcttcctttccccaatatatatgtagtgatgataacacatattcattggggagaaaccctccacttatatatcctcctttaaaattaatccttactagttttccagtgttctggatagtggttggtttcgactcattataatgtatgtctaacggcttcaatcgcgcgttagaaattgcttttttagtttctatattaataggagatagttgttgcggcatagtaaaaatgaaatgataactgtttaaaaatagctcttagtatgggaattacaatggatgaggaagtgatatttgaaactcctagagaattaatatctattaaacgaataaaagatattccaagatcaaaagacacgcatgtgtttgctgcgtgtataacaagtgacggatatccgttaataggagctagaagaacttcattcgcgttccaggcgatattatctcaacaaaattcagattctatctttagagtatccactaaactattacggtttatgtactacaatgaactaagagaaatctttagacggttgagaaaaggttctatcaacaatatcgatcctcactttgaagagttaatattattgggtggtaaactagataaaaaggaatctattaaagattgtttaagaagagaattaaaagaggaaagtgatgaacgtataacagtaaaagaatttggaaatgtaattctaaaacttacaacacgggataaattatttaataaagtatatataagttattgcatggcgtgttttattaatcaatcgttggaggatttatcgcatactagtatttacaatgtagaaattagaaagattaaatcattaaatgattgtattaacgacgataaatacgaatatctgtcttatatttataatatgctagttaatagtaaatgaacttttacagatctagtataattagtcagattattaagtataatagacgactagctaagtctattatttgcgaggatgactctcaaattattacactcacggcattcgttaaccaatgcctatggtgtcataaacgagtatccgtgtccgctattttattaactactgataacaaaatattagtatgtaacagacgagatagttttctctattctgaaataattagaactagaaacatgtttagaaagaaacgattatttctgaattattccaattatttgaacaaacaggaaagaagtatactatcgtcatttttttctctagatccagctactactgataatgatagaatagacgctatttatccgggtggcatacccaaaaggggtgagaatgttccagagtgtttatccagggaaattaaagaagaagttaatatagacaattcttttgtattcatagacactcggttttttattcatggcatcatagaagataccattattaataaattttttgaggtaatcttctttgtcggaagaatatctctaacgagtgatcaaatcattgatacatttaaaagtaatcatgaaatcaaggatctaatatttttagatccgaattcaggtaatggactccaatacgaaattgcaaaatatgctctagatactgcaaaacttaaatgttacggccatagaggatgttattatgaatcattaaaaaaattaactgaggatgattgattaaaaaatataaattaatttaccatcgtgtatttttataacgggattgtccggcatatcatgtagatagttaccgtctacatcgtatactcgaccatctacgcctttaaatcctctatttattgacattaatctattagaattggaataccaaatattagtaccctcaattagtttattggtaatattttttttagacgatagatcgatggctcttgaaaccaaggttttccaaccggactcattgtcgatcggtgagaagtctttttcattagcatgaatccattctaatgatgtatgtttaaacactctaaacaattggacaaattcttttgatttgctttgaatgatttcaaataggtcttcgtctacagtaggcataccattagataatctagccattataaagtgcacgtttacatatctacgttctggaggagtaagaacgtgactattgagacgaatggctcttcctactatctgacgaagagacgcctcgttccatgtcatatctaaaatgaagatatcattaattgagaaaaaactaataccctcgcctccactagaagagaatacgcatgttttaatgcattctccgttagtgtttgattcttggttaaactcagccaccgccttgattctagtatcttttgttctagatgagaactctatattagagataccaaagactttgaaatatagtaataagatttctattcctgactgattaacaaatggttcaaagactagacatttaccatgggatgctaatattcccaaacatacatctataaatttgacgcttttctcttttaattcagtaaatagagagatatcagccgcactagcatcccctttcaatagttctccctttttaaaggtatctaatgcggatttagaaaactctctatctcttaatgaatttttaaaatcattatatagtgttgctatctcttgcgcgtattcgcccggatcacgattttgtctttcaggaaagctatcgaacgtaaacgtagtagccatacgtctcagaattctaaatgatgatatacctgtttttatttcagcgagtttagccttttgataaatttcttcttgctttttcgacatattaacgtatcgcattaatactgttttcttagcgaatgatgcagacccttctacgtcatcaaaaatagaaaactcgttattaactatatacgaacatagtcctcctagtttggagactaattctttttcatcgactagacgtttattctcaaatagcgattggtgttgtaaggatcctggtcgtagtaagttaaccaacatggtgaattcttgcacactattgacgataggtgtagccgataaacaaatcatcttatggttttttaacgcaatggtcttagataaaaaattatatactgaacgagtaggacggatcttaccatcttctttgattaatgatttagaaatgaagttatgacattcatcaataatgacgcatattctactcttggaattaatagttttgatattagtaaaaaatttatttctaaaattttgatcatcgtaattaataaaaatacaatccttcgttatctctggagcgtatctgagtatagtgttcatccaaggatcttctatcaaagcctttttcaccaataagataatagcccaattcgtataaatatccttaagatgtttgagaatatatacagtagtcattgttttaccgacacccgtttcatggaacaataaaagagaatgcatactgtctaatcctaagaaaactcttgctacaaaatgttgataatccttgaggcgtactacgtccgaccccatcatttcaacgggcatattagtagttctgcgtaaggcataatcgatataggccgcgtgtgatttactcatttatgagtgataagtaataactatgttttaaaaatcacagcagtagtttaactagtcttctctgatgtttgttttcgatactttttgaatcagaagtcatactagaataaagcaacgagtgaacgtaatagagagcttcgtatactctattcgaaaactctaagaacttattaatgaattccgtatccactggattgtttaaaatactaaattgaacactgttcacatccttccaagaagaagacttagtgacggacttaacatgagacataaataaatccaaattttttttacaaacatcactagccaccataatggcgctatctttcaaccagctatcgcttacgcattttagcagtctaacatttttaaagagactacaatatattctcatagtatcgattacacctctaccgaataaagttggaagtttaataatacaatatttttcgtttacaaaatcaaataatggtcgaaacacgtcgaaggttaacatcttataatcgctaatgtatagattgttttcagtgagatgattattagatttaatagcatctcgttcacgtttgaacagtttattgcgtgcgctgaggtcggcaactacggcgtccgctttagtactcctcccataatactttacgctattaatctttaaaatttcatagactttatctagatcgctttctggtaacatgatatcatgtgtaaaaagttttaacatgtcggtcggcattctatttagatcattaactctagaaatctgaagaaagtaattagctccgtattccagactaggtaatgggcttttacctagagacagattaagttctggcaatgtttcataaaatggaagaaggacatgcgttccctcccggatattttttacaatttcatccatttacaactctatagtttgttttcattattattagttattatctcccataatcttggtaatacttaccccttgatcgtaagataccttatacaggtcattacatacaactaccaattgtttttgtacataatagattggatggttgacatccatggtggaataaactactcgaacagatagtttatctttccccctagatacattagccgtaatagttgtcggcctaaagaatatctttggtgtaaagttaaaagttagggttcttgttccattattgctttttgtcagtagttcattataaattctcgagatgggtccgttctctgaatatagaacatcatttccaaatctaacttctagtctagaaataatatcggtcttattcttaaaatctattcccttgatgaagggatcgttaatgaacaaatccttggcctttgattcggctgatctattatctccgttatagacgttacgttgactagtccaaagacttacaggaatagatgtatcgatgatgttgatactatgtgatatgtgagcaaagattgttctcttagtggcatcactatatgttccagtaatggcggaaaactttttagaaatgttatatataaaagaattttttcgtgttccaaacattagcagattagtatgaagataaacactcatattatcaggaacattatcaatttttacatacacatcagcatcttgaatagaaacgataccatcttctggaacctctacgatctcggcagactccggataaccagtcggtgggccatcgctaacaataactagatcatccaacaatctactcacatatgcatctatataatctttttcatcttgtgagtaccctggatacgaaataaatttattatccgtatttccataataaggtttagtataaacagagagagatgttgccgcatgaacttcagttacagtcgccgttggttggtttatttgacctattactctcctaggtttctctataaacgatggtttaatttgtacattcttaaccatatatccaataaagctcaattcaggaacataaacaaattctttgttgaacgtttcaaagtcgaacgaagagtcacgaataacgatatcggatactggattgaaggttaccgttacggtaatttttgaatcggatagtttaagactgctgaatgtatcttccacatcaaacggagttttaatataaacgtatactgtagatggttctttaatagtgtcattaggagttaggccaatagaaatatcattaagttcactagaatatccagagtgtttcaaagcaattgtattattgatacaattattatataattcttcgccctcaatttcccaaataacaccgttacacgaagagatagatacgtgattaatacatttatatccaacatatggtacgtaactgaatcttcccatacctttaacttctggaagttccaaactcagaaccaaatgattaagcgcagtaatatactgatccctaatttcgaagctagcgatagcctgattgtctggaccatcgtttgtcataactccggatagagaaatatattgcggcatatacaaagttggaatttgactatcgactgcgaagacattagaccgtttaatagagtcatccccaccgatcaaagaattaatgatagtattattcattttctatttaaaatggaaaaagcttacaataaactccgtagagaaatatctataatttgtgagttttccttaaagtaacagcttccgtaaacgccgtctttatctcttagtaggtttattgtatttatgaccttttccttatcttcatagaatactaaaggcaacaaagaaatttttggttcttctctaagagctacgtgagacttaaccatagaagccaacgaatccctacatattttagaacagaaataccctacttcaccacccttgtatgtctcaatactaataggtctaaaaaccaaatcttgattacaaaaccaacacttatcaattacactatttgtcttaatagacacatctgccatagatttataatactttggtagtatacaagcgagtgcttcttctttagcgggcttaaagactgctttaggtgctgaaataaccacatctggaaggcttactcgcttagccatttaattacggaactatttttttatacttctaatgagcaagtagaaaacctctcatctacaaaaacgtactcgtgtccataatcctctaccatagttacacgttttttagatctcatatgtgctaaaaagttttcccatactaattggttactattatttttcgtataatttttaacagtttgaggttttagatttttagttacagaagtgatatcgaatattttatccaaaaagaatgaataattaattgtcttagaaggagtgttttcttggcaaaagaataccaagtgcttaaatatttctactacttcattaatcttttctgtactcagattcagtttctcatcttttacttgattgattatttcaaagactaacttataatcctttttatttattctctcgttagccttaagaaaactagatacaaaatttgcatctacatcatccgtggatatttgatttttttccatgatatccaagagttccgagataatttctccagaacattgatgagacaataatctccgcaatacatttctcaaatgaataagtttattagacacgtggaagtttgactttttttgtacctttgtacatttttgaaataccgactcgcaaaaaatacaatattcatatccttgttcagatactataccgttatgtctacaaccgctacataatcgtagattcatgttaacactctacgtatctcgtcgtccaatattttatataaaaacattttatttctagacgttgccagaaaatcctgtaatatttttagttttttgggctgtgaataaagtatcgccctaatattgttaccgtcttccgccaatatagtagttaaattatccgcacatgcagaagaacaccgcttaggcggattcagtacaatgttatatttttcgtaccaactcatttaaatatcataatctaaaatagttctgtaatatgtctagcgctaatatattgatcataatcctgtgcataaattaagatacaacaatgtctcgaaatcatcgacatggcttcttccatagttagaagatcgtcgtcaaagttagcaacgtgattcatcaacatttgctgttttgaggcagcaaatactgaaccgtcgccattcaaccattcataaaaaccatcgtctgaatccattgataatttcttgtactggtttttgagagctcgcatcaatctagcatttctagctcccggattgaaaacagaaagaggatcgtacatccagggtccattttctgtaaatagaatcgtataatgtcccttcaagaagatatcagacgatccacaatcaaagaattggtctccgagtttgtaacaaactgcggactttaacctatacatgataccgtttagcataatttctggtgatacgtcaatcggagtatcatctattagagatctaaagccggtgtaacattctccaccaaacatattcttattctgacgtcgttctacataaaacatcattgctccattaacgataacaggggaatgaacagcactacccatcacattagttcccaatggatcaatgtgtgtaactccagaacatcttccatagcctatgttaggaggagcgaacaccactcttccactattgccatcgaatgccatagaataaatatccttggaattgatagaaatcggactgtcggatgttgtgatcatcttcataggattaacaactatgtatggtgccgcctgaagtttcatatcgtaactgatgccgtttataggtctagccacagaaaccaacgtaggtctaaatccaactatagacaaaatagaagccaatatctgttcctcatctgtcataacttgagagcatccagtatgaataatcttcattagatggggatctaccgcatcatcatcgttacaataaaaaattcccattctaatgttcataattgcttttctaatcatggtatgcatgtttgctctctgaatctctgtggaaattagatctgatacacctgtaatcactatcggattatcctccgtaagacgattaaccaacaacatataattataagactttacttttctaaattcataaagttgctggattaggctataggtgtctccatgtacatacgcgttctcgagcgcaggaagtttaataccgaatagtgccatcagaataggatgaatatagtaattagtttctggttttctataaataaaagacaaatcttgtgaactagacatatcggtaaaatgcatggattggaatcgtgtagtcgacagaagaatatgatgattagatggagagtatattttatctaactctttgagttggtcaccgattctaggactagctcgagaatgaataagtactaaaggatgagtacatttcacagaaacactagcattgttcaatgtgctctttacatgggtaaggagttgaaatagctcgtttctatttgttctgacaatatttagtttattcataatgttaagcatatcctgaatagtaaagttagatgtgtcatacttgttagtagttagatatttagcaattgcattcccatcatttctcaatctcgtactccaatcatgcgtggatgctacttcgtcgatggaaaccatacaatcctttttgataggctgttgagattgatcatttcctgcacgtttaggtttggtacgttgatttctagcccctgcggatataaagtcatcgtctacaatttgggacaatgaattgcatacactacaagacaaagatttatcagaagtgtgaatatgatcttcatctaccaaagaaagagtttgattagtataactagattttagtcctgcgttagatgttaaaaaaacatcgctattgaccacggcttccattatttatattcgtagtttttactcgaaagcgtgattttaatatccaatcttattacttttggaatcgttcaaaacctttgactagttgtagaatttgatctattgccctacgcgtatactcccttgcatcatatacgttcgtcaccagatcgtttgtttcggcctgaagttggtgcatatctctttcaacattcgacatgagatccttaagggccatatcgtctagattttgttgagatgctgctcctggatttggattttgttgtgctgttgtacatactgtaccaccagtaggtgtaggagtacatacagtggccacaataggaggttgagaaagtgtaaccgttggagtagtacaagaaatacttccatccgattgttgtgtacatgtagttgttggtaacgtctgagaaggttgggtagatggcggcgtcgtcgttttttgatctttattaaatttagagataatatcctgaacagcattgctcggcgtcaacgctggaaggagtgaactcgccggcgcatcagtatcttcagacagccaatcaaaaagattagacatatcagatgatgtattagtttgttgtcgtggttttggtgtaggagcagtactactaggtagaagaataggagccgatgtagctgttggaaccggctgtggagttatatgaatagttggttgtagcggttggataggctgtctgctggcggccatcatattatctctagctagttgttctcgcaactgtctttgataatacgactcttgagactttagtcctatttcaatcgcttcatcctttttcgtatccggatccttttcttcagaataatagattgacgactttggtgtagaggattctgccagcctctgtgagaacttgttaaagaagtccatttaaggctttaaaattgaattgcgattataagattaaatggcagacacagacgatattatcgactatgaatccgatgatctcaccgaatacgaggatgatgaagaagaggaagaagatggagagtcactagaaactagtgatatagatcccaaatcttcttataagattgtagaatcagcatccactcatatagaagatgcgcattccaatcttaaacatatagggaatcatatatctgctcttaaacgacgctatactagacgtataagtctatttgaaatagcgggtataatagcagaaagctataacttgcttcaacgaggaagattacctctagtttcagaattttctgacgaaacgatgaagcaaaatatgctacatgtaattatacaagagatagaggagggttcttgtcctatagtcatcgaaaagaacggagaattgttgtcggtaaacgattttgacaaagatggtctaaaattccatctagactatattatcaaaatttggaaacttcaaaaacgatattagaatttatacgaatatcgttctctaaatgtcacaatcaagtctcgcatgttcagcaatttattgtcgtactttatatcgtgttcattaacgatatcttgcaaaatagtaatgattctatcttccttcgatagatattcttcagagattattgtcttatattctttcttgttatcagatatgaatttgataagactttgaacattattgatacccgtctgtttaattttttctacagatattttagttttggcagattctatcgtatctgtcaatagacatccaacatcgacattcgacgtcaattgtctataaatcaacgtataaattttagaaataacattagcgaattgttgtgcgttgatgtcgttattctgaaacagtatgattttaggtagcattttcttaacaaagagaacgtatttattgttactcagttgaacagatgatatatccagattactaacgcatctgattccgtataccaaactttcagaagaaatggtatacaattgtttgtattcattcaatgtctctttttcagaaattagtttagagtcgaatactgcaataattttcaagagatagttttcatcagataagattttatttagtgtagatatgataaaactattgttttgttggagaacttgatacgccgcgttctctgtagtcgacgctctcaaatgggaaacaatctccattatttttttggaatcggatactatatcttcggtatcttgacgcagtctagtatacatagagttaagagagattagagtttgtacattaagcaacatgtctctaaatgtggctacaaacttttcctttttcacatcatctagtttattatataccgatttcacaacggcaccagatttaaggaaccagaatgaaaaactctgataactacaatatttcatcatagttacgattttatcatcttctatagttggtgtaatagcgcatacctttttctccaagactggaaccaacgtcataaaaatgtttaaatcaaaatccatatcaacatctgatgcgctaagaccagtctcgcgttcaagattatctttactaatggtgacgaactcatcgtataaaactctaagtttgtccattatttatttacagatttagttgtttaatttatttgtgctcttccagagttgggatagtatttttctaacgtcggtattatattattaggatctacgttcatatgtatcataatattaatcatccacgttttgataaatctatctttagcttctgaaataacgtatttaaacaaaggagaaaaatatttagctacggcatcagacgcaataacattttttgtaaatgtaacgtatttagacgacagatcttcgttaaaaagttttccatctatgtagaatccatcggttgttaacaccattcccgcgtcagattgaataggagtttgaatagtttgttttggaaatagatccttcaataacttatagttgggtgggaaaaaatcgattttatcactagactctttcttttttactatcattacctcatgaactatttcttgaatgagtatatgtattttctttcctatatcggacgcgttcattggaaaatataccatgtcgttaactataagaatatttttatcctcgtttacaaactgaataatatcagatgtagttcgtaaacgaactatatcatcaccagcacaacatctaactatatgatatccactagtttcctttagccgtttattatcttgttccatattagcagtcattccatcatttaagaaggcgtcaaaaataatagggagaaatgacattttggattctgttacaactttaccaaaattaaggatatacggacttactatctttttctcaacgtcaatttgatgaacacacgatgaaaatgtgcttctatgagattgatcatgtagaaaacaacaagggatacaatatttccgcatatcatgaaatatattaagaaatcccaccttattatatttccccaaaggatccatgcacgtaaacattatgccgttatcattaataaagacttctttctcatcggatctgtaaaagttgttactgatttttttcattccaggatctagataattaataatgatgggttttctattcttattctttgtattttggcatatcctagaccagtaaacagtttccactttggtaaaatcagcagacttttgaacgctattaaacatggcattaatggcaataactaaaaatgtaaaatatttttctatgttaggaatatggtttttcactttaatagatatatggtttttggccaaaatgatagatatttttttatccgaggatagtaaaatattattagtcgccgtctctataaaaatgaagctagtctcgatatccaattttattctagaattgataggagtcgccaaatgtaccttatacgttatatctcccttgatgcgttccatttgtgtatctatatcggacacaagatctgtaaatagttttacgttattaatcatcacggtatcgccgtcgctagataacgctaatgtaccatccaagtcccaaatggagagatttaactgttcatcgtttagaataaaatgattaccggtcatattaataaagtgttcatcgtatctagataacaacgacttataattaatgtccaagtcttgaactcgctgaatgatcttttttaacccagttagttttagattggtacgaaatatattgttaaactttgattctacagtaatgtccaaatctagttgtggaaatacttccatcaacattgtttcaaacttgataatattattatctacatcttcgtacgatccaaattccggaatagatgtatcgcacgctctggccacccagataaccaaaaagtcacacgctccaggatatacattgtataaaaagctatcgttttttagtagggtttttttctgcgtgtatacgaagggattaaaaatagtattatcaacgtaactatattccaaattattcttatgagaatagataataatatcgtccttaatatctaacaaatttcctaaatatccctttaattgagtcattcgaagcgtcaatagaatatgtctcttaactatttccggctgttgtatatttaaatgacttcgtaaaaaataatatatgggcgacttctcatctatgtaatcatatggagtgagatatagggctcgttctacctcctgccccttacccacctgtaataccaattgcggacttactatatatcgcatatttatatcgtggggtaaagtgaaaatctactaccgatgatgtaagtcttacaatgttcgaaccagtaccagatcttaatttggaggcctccgtagaactaggggaggtaaatatagatcaaacaacacctatgataaaggagaatagcggttttatatcccgcagtagacgtctattcgcccatagatctaaggatgatgagagaaaactagcactacgattctttttacaaagactttattttttagatcatagagagattcattatttgttcagatgcgttgacgctgtaaaagacgtcactattaccaaaaaaaataacattatcgtggcgccttatatagcacttttaactatcgcatcaaaaggatgcaaacttacagaaacaatgattgaagcattctttccagaactatataatgaacatagtaagaaatttaaattcaactctcaagtatccatcatccaagaaaaactcggataccagtttggaaactatcacgtttatgattttgaaccgtattactctacagtagctctggctattcgagatgaacattcatctggcatttttaatatccgtcaagagagttatctggtaagttcattatctgaaataacatatagattttatctaattaatctaaaatctgatcttgttcaatggagtgctagtacgggcgctgtaattaatcaaatggtaaatactgtattgattacagtgtatgaaaagttacaactggtcatagaaaatgattcacaatttacatgttcattggctgtggaatcaaaacttccaataaaattacttaaagatagaaatgaattatttacaaaattcattaacgagttaaaaaagaccagttcattcaagataagcaaacgcgataaggatacgctactaaaatattttacttaggactggagttagaatttatagacgactcatttcgtttatcattgttactattattactattactatcattattagtgttggcattattagtattcttcttgtcatcttgttcagaaatatacagcaatgctatacctaatactaaatacattatcatgctcgcaatggctctaacaacaacgaaccaaaatgaatttggtcgtagcttttgttcacaaaaatacataaagaaatgtctacataaatctatggcgccattggctacttgaaatagcgccagtcctcctacagattttaatatagctgtataacatgacatttattcatcatcaaaagagacagagtcaccatctgtcatatttagattttttttcatgtgttcaaagtatcctctactcatttcattataatagtttatcatacttagaattttaggacggatcaatgagtaagacttgactagatcgtcagtagtaatttgtgcatcgtctattctgcatccgcttcgtcgaataatgtatagcatcgctttgagattctccatagctatcaagtctttatacaatgacatggaaatatctgtgaatactttatacttctccaacatcgatgccttaacatcatcgcctactttagcattgaaaatacgttctattgtgtagatggatgtagcaagatttttaaacaacaatgccatcttacacgatgattgcctcaagtctccaatcgtttgtttagaacgattagctacagagtccaatgcttggctgactagcatattattatctttagaaattgtattcttcaatgaggcgtttatcatatctgtgatttcgttagtcatattacagtctgactgggttgtaatgttatccaacatatcacctatggatacggtacacgtaccagcatttgtaataatcctatctaagatgttgtatggcattgcgcagaaaatatcttctcctgtaatatctccactctcgataaatctactcagattattcttaaatgccttattctctggagaaaagatatcagtgtccatcatttcattaatagtatacgcagaaaagataccacgagtatcaattctatccaagatacttatcggttccgagtcacagataatggtttcctctccttcgggagatcctgcatagaaatatctaggacaatagtttctatactgtctgtaactctgataatctctaaagtcactaactgataccatgaaattgagaagatcaaacgctgaagtaattaatttttctgcctcgtttttactacaactagttttcatcaatgtagtgacgatgtattgtttagttacttttggtctaatactgatgatagagatattattgcttcccataatggatcttctagtagtcaccttaaagcccattgatgcgaatagcagatagataaagtcttggtatgactcctttctaatatagtacggactacctttgtcacccaactttatacccacataagccataacaacctctttaatagccgtttcatgaggtttatcagccatgagcctgagtagttggaagaatctcatgaatcccgtctcagaaagtcctatatgcatgatagatttatctttcctgggaaactctcgtatagtcatagatgaaatactctttaaagtttctgaaataagattagtaacagtcttacctccgactactctaggtaacaaacaaactctaataggtgttttctctgcggagataatatcagaaaggatagagcaataagtagtattattgtgattataaagaccgaatacataacaggtagaatttataaacatcatgtcctgaaggtttttagacttgtattcctcgtaatccataccgtcccaaaacatggatttggtaactttgatagccgtagatctttgttccttcgccaacaggttaaagaaattaataaagaatttgttgtttctatttatgtccacaaattgcacgtttggaagcgccacggttacattcactgcagcattttgaggatcgcgagtatgaagtacgatgttattgtttactggtatatctggaaagaaatctaccagtctaggaataagagattgatatcgcatagaaatagtaaagtttataatctcatcatcgaagagcattttgttaccattgtaataaatatccactctgtcatatgtataaatgaagtactgttcaaacatgatgagatgtttatatgttggcatagtagtgagatcgacgtttggtaatggcaatgtattaagattaactccataatgtctagcagcatctgcgatgttataagcgtcgtcaaagcggggtcgatcttgtattgttatatattgtctaacacctataagattatcaaaatcttgtctgcttaatacaccgttaacaatttttgccttgaattcttttattggtgcattaataacatccttatagaggatgttaaacaaataagtgttatcaaagttaagatctggatatttcttttctgctagaacatccattgagtcggagccatctggtttaatataaccaccgataaatctagctctgtattctgtatccgtcaatctaatattaagaaggtgttgagtgaaaggtggaagatcgtaaaagctgtgagtattaatgataggattagtttccgaactaatgttaattggggtattaataatatctatatttccagcgttaagtgtaacattaaacagttttaattcacgtgacgtggtatcaattaaataattaatgcccaatttggatatagcagcctgaagctcatcttgtttagttacggatcctaatgagttattaagcaatatatcgaacggatgaacgaaggttgttttaagttggtcacatactttgtaatctagacatagatgcggaagaacggtagaaactatacgaaataaatattcagagtcctctaattgatcaagagtaactattgacttaataggcatcatttatttagtattaaatgacgaccgtaccagtgacggatatacaaaacgatttaattacagagttttcagaagataattatccatctaacaaaaattatgaaataactcttcgtcaaatgtctattctaactcacgttaacaacgtggtagatagagaacataatgccgccgtagtgtcatctccagaggaaatatcctcacaacttaatgaagatctatttccagatgatgattcaccggccactattatcgaacgagtacaacctcatactactattattgacgatactccacctcctacgtttcgtagagagttattaatatcggaacaacgtcaacaacgagaaaaaagatttaatattacagtatcgaaaaatgctgaagcaataatggaatctagatctatgataacttctatgccaacacaaacaccatccttgggagtagtttatgataaagataaaagaattcagatgttagaggatgaagtggttaatcttagaaatcaacgatctaatacaaaatcatctgataatttagataattttaccaaaatactatttggtaagactccgtacaaatcaacagaagttaataagcgtatagccatcgttaattatgcaaatttgaacgggtcccccttatcagtcgaggacttggatgtttgttcggaggatgaaatagatagaatctataaaacgattaaacaatatcacgaaagtagaaaacgaaaaattatcgtcactaacgtgattattattgtcataaacattatcgagcaggcattgctaaaactcggatttgaagaaatcaaaggactgagtaccgatatcacttcagaaattatcgatgtggagatcggagatgactgcgatgctgtagcatctaaactaggaatcggtaacagtccggttcttaatattgtattgtttatactcaagatattcgttaaacgaattaaaattatttaatttaatacattcccatatccagacaacaatcgtctggattaatctgttcctgtcgtctcataccggacgacatattaatctttttattagtgggcatctttttagatggtttctttttcccagcattaactgagtcgatacctagaagatcgtgattgatctctccgaccattccacgaacttctaattggccgtctctgacggtaccataaactattttaccagcattagtaacagcttggacaatctgaccatccatcgcattgtacgatgtagtagtaactgttgttctacgtctaggagcaccagaagtatttttggagcccttggatgttgatgtagaagaagacgaggattttgattttggtttacatgtaatacattttgaactctttgattttgtatcacatgcgccggcagtcacatctgtttgagaattaagattattgttgcctcctttgacggctgcatctccaccgatttgcgctagtagatttttaagctgtggtgtaatcttattaactgtttcgatataatcatcgtaactgcttctaacggctaaattttttttatccgccatttagaagctaaaaatatttttatttatgcagaagatttaactagattatacaatgaactaatatgatccttttccagattatttacaaacttggtattttttggttctggaggaggcgaatttaaattcggacttggattcggattttgtaagttcttgatcttattatacatcgagtataggatggcgacagtaactgctacacaaataccgatcaaaagaagaataccaatcatttattgacaataacttcactattgatcaagtatgcaatatatcatcttttcactaaataagtagtaataatgattcaacaatgtcgagatatatggacgataataatttagttcatggaaatatcgctatgattggtgtgaatgactccgctaactctgtggggtgcgcagtgctttccccacatagaataaattagcattccgactgtgataataataccaagtataaacgccataatactcaatactttccatgtacgagtgggactggtagacttactaaagtcaataaaggcgaagatacacgaaagaatcaaaagaatgattccagcgattagcacgccggaaaaataatttccaatcataagcatcatgtccatttaactaataaaaattttaaatcgccgaatgaacaaagtggaatataaaccatataaaaacaatagtttgtactgcaaaaataatatctatttttgttttcgaagatatggtaaaattaaatagtagtacacagcatgttataactaacagcagcaacggctcgtaattacttatcatttactagacgaaaaggtggtgggatattttcttgctcaaataatacgaatatatcacccatccattttatgcgatgtttatatactctaatctttaatagatctatagacgacgggtttaccaacaatatagattttatcgattcatctaatttaaacccttccttaaacgtgaatgatctattatctggcataacgatgaccctacctgatgaatcggacaatgtactgggccatgtagaataaattatcaacgaattatcgtctacgaacatttatatcatttgttttaattttaggacgcgaataaatggatataaaatagaaaataacagatattacaaccagtgttatggccgcgcccaaccaggtaggcagttttattttatcttttactacaggttctcctggatgtacgtcaccaacggcggacgtagttctagtacaattagacgtaagttccgcttgggaattttttaacgctaaagagttaacgttaatcgtgcacccaacgtatttacatctagttcgttgaacatcttgattataatataaccattttctatctctagattcgtcagtgcactcatgtaaccaacataccctaggtcctaaatatttatctccggaattagattttggataattcgcgcaccaacaatttctatttcctttatgatcgttacaaaagacgtataatgccgtatccccaaaagtaaaataatcaggacgaataattctaataaactcagaacaatatctcgcatccatatgtttggagcaaatatcggaataagtagacatagccggtttccgttttgcacgtaaccattctaaacaattggggtttccaggatcgtttctacaaaatccagtcatgaaatcgtcacaatgttctgtcttgtaattattattaaatatttttggacagtgtttggtatttgtcttagaacaacattttgccacgctatcactatcgcccaggagataatccttttttataaaatgacatcgttgcccggatgctatataatcagtagcgtgttttaaatccttaatatattcaggagttacctcgttctgataatagattaatgatccaggacgaaatttgaaagaactacatggttctccatgaattaatacatattgtttagcaaattcaggaactataaaactactacaatgatctatcgacataccatctatcaaacaaaacttgggtttaatttctcccggagatgtttcataatagtacgtataactttcttctgcaaacttaacagctctattatattcaggataattaaaacctaattccatatatttgtctcgtatatctgctattcctggtgctattttgattctattaagagtaacagctgcccccattcttaataatcgtcagtatttaaactgttaaatgttggtatatcaacatctaccttatttcccgcagtataaggtttgttgcaggtatactgttcaggaatggttacatttatacttcttctatagtcctgtctttcgatgttcatcacatatgcaaagaacagaataaacaaaataatgtaagaaataatattaaatatctgtgaattcgtaaatacattgattgccataataattacagcagctacaatacacacaatagacattcccacagtgttgccattacctccacgatacatttgagttactaagcaataggtaataactaagctagtaagaggcaatagaaaagatgagataaatatcatcaatatagagattagaggagggctatatagagccaagacgaacaaaatcaaaccgagtaacgttctaacatcattatttttgaagattcccaaataatcattcattcctccataatcgttttgcatcatacctccatctttaggcataaacgattgctgctgttcctctgtaaataaatctttatcaagcactccagcacccgcagagaagtcgtcaagcatattgtaatatcttaaataactcatttatatattaaaaaatgtcactattaaagatggagtataatctttatgccgaactaaaaaaaatgacttgtggtcaacccctaagtctttttaacgaagacggggatttcgtagaagttgaaccgggatcatcctttaagtttctgatacctaagggattttacgcctctccttccgtaaagacgagtctagtattcgagacattaacaacgaccgataataaaatcactagtatcaatccaacaaatgcgccaaagttatatcctcttcaacgcaaagtcgtatctgaagtagtttctaatatgaggaaaatgatcgaatcaaaacgtcctctatacatcactcttcacttggcgtgtggatttggtaagactattaccacgtgttatcttatggctacacacggtagaaaaaccgtcatttgcgtacccaataaaatgttaatacatcaatggaagacacaggtagaggcagtcggattggaacataagatatccatagatggagtaagtagtctattaaaggaactaaagactcaaagtccggatgtattaatagtagtcagtagacatctgacaaacgatgccttttgtaaatatatcaataagcattatgatttgttcatcttggatgaatcacatacgtataatctgatgaacaatacagcagttacaagatttttagcgtattatcctccgatgatgtgttattttttaactgctacacctagaccatctaaccgaatttattgtaacagtattattaatattgccaagttatccaatctaaaaaaaactatctatgcagtagatagtttttttgagccatattccacagataatattagacatatggtaaaacgactagatggaccatctaataaatatcatatatataccgagaagttattatctgtagacgagcctagaaatcaacttattcttgataccctggtagaagaattcaagtcaggaactattaatcgcattttagttattactaaactacgtgaacatatggtattattctacaaacgattattagattttttcggaccagaggttgtatttataggagacgcccaaaatagacgtactccagatatggtcaaatcaatcaaggaactaaatagatttatattcgtatccaccttattttattccggtactggtttagatattcctagtttggattcgttgttcatttgctcggcagtaatcaacaatatgcaaatagagcaattactagggagggtatgtcgagaaacagaactattagataggacggtatatgtatttcctaacacatccatcaaagaaataaagtacatgataggaaatttcatgcaacgaattattagtctgtctgtagataaactaggatttaaacaaaaaagttatcggaaacatcaagaatccgatcccacttctgcatgtacaacatcatccagagaagaacgtgtattaaatagaatatttaactcgcaaaatcgttaagaagtttaagcgacgatccgcatgctgcgcaggccagtgtattacccctcatagtattaatataatccaatgatacttttgtgatgtcggaaatcttaaccaatttagactgacaggcagaacacgtcatgcaatcatcatcgtcatcgataactgtagtcttgggcttctttttgcgactcttcattccggaacgcacattggtgctatccatttaggtagtaaaaaataagtcagaatatgccctataacacgatcgtgcaaaacctggtatatcgtctctatctttatcacaatatagtgtatcgacatttttattattattgacctcgtttatcttggaacatggaatgggaacatttttgttatcaacggccatctttgccttaattccagatgttgtaaaattataactaaacagtctatcatcgacacaaatgaaattcttgtttagacgtttgtagtttacgtatgcggctcgttcgcgtctcattttttcagatattgcaggtactataatattaaaaataagaatgaaataacataggattaaaaataaagttatcatgacttctagcgctgatttaactaacttaaaagaattacttagtctgtacaaaagtttgagattttcagattctgcggctatagaaaagtataattctttggtagaatggggaacatctacttactggaaaataggcgtgcaaaaggtagctaatgtcgagacgtcaatatctgattattatgatgaggtaaaaaataaaccgtttaatattgatccgggctattacattttcttaccggtatattttgggagcgtctttatttattcgaagggtaaaaatatggtagaacttggatctggaaactcttttcaaataccagatgatatgcgaagtgcgtgtaacaaagtattagacagcgataacggaatagactttctgagatttgttttgttaaacaatagatggataatggaagatgctatatcaaaatatcagtctccagttaatatatttaaactagctagtgagtacggattaaacatacccaaatatttagaaattgaaatagaggaagacacattatttgacgacgagttatactctattatagaacgctctttcgatgataaatttccaaaaatatccatatcgtatattaagttgggagaacttagacggcaagttgtagactttttcaaattctcattcatgtatattgagtccatcaaggtagatcgtataggagataatatttttattcctagcgttataacaaaatcaggaaaaaagatattagtaaaagatgtagaccatttaatacgatccaaggttagagaacatacatttgtaaaagtaaaaaagaaaaacacattttccattttatacgactatgatggaaacggaacagaaactagaggagaagtaataaaacgaattatagacactataggacgagactattatgttaacggaaagtatttctctaaggttggtagtgcaggcttaaagcaattgactaataaattagatattaatgagtgcgcaactgtcgatgagttagttgatgagattaataaatccggaactgtaaaacgaaaaataaaaaaccaatcagcatttgatttaagcagagaatgtttgggatatccagaagcggattttataacgttagttaataacatgcggttcaaaatagaaaattgtaaggttgtaaatttcaatattgaaaatactaattgtttaaataacccgagtattgaaactatatatggaaactttaaccagttcgtctcaatctttaatgtcgtcaccgatgtcaaaaaaagattattcgagtgaaataatatgcgcctttgatataggtgcaaaaaatcctgccagaactgttttagaagtcaaggataactccgttagggtattggatatatcaaaattagactggagttctgattgggaaaggcgcatagctaaagatttgtcacaatatgaatacactacagttcttctagaacgtcagcctagaaggtcgccgtatgttaaatttatctattttattaaaggctttttatatcatacatcggctgccaaagttatttgcgtctcgcctgtcatgtctggtaattcatatagagatcgaaaaaagagatcggtcgaagcatttcttgattggatggacacattcggattgcgagactccgttccggatagacgcaaattagacgatgtagcggatagtttcaatttggctatgagatacgtattagataaatggaatactaattatacaccttataataggtgtaaatctagaaattacataaaaaaaatgtaataacgttagtaacgccattatggataatctatttacctttctacatgaaatagaagatagatatgccagaactatttttaactttcatctaataagttgcgatgaaataggagatatatatggtcttatgaaagaacgcatttcctcagaggatatgtttgataatatagtgtataataaagatatacatcctgccattaagaaactagtgtattgcgacatccaacttactaaacacattattaatcagaatacgtatccggtatttaacgattcttcacaagtgaaatgttgtcattatttcgacataaactcagataatagcaatattagctctcgtacagtagagatatttgagagggaaaagtcatctcttgtatcatatattaaaactaccaataagaagagaaaggtcaattacggcgaaataaagaaaactgttcatggaggcactaatgcaaattacttttccggtaaaaagtctgacgagtatctgagtactacagttagatccaacattaatcaaccttggatcaaaaccatctctaagaggatgagagttgatatcattaatcactctatagtaacgcgtggaaaaagctctatattacaaactatagaaattatttttactaatagaacatgtgtgaaaatattcaaggattctactatgcacattattctatccaaggacaaggatgaaaaggggtgtatacacatgattgacaaattattctatgtctattataatttatttctgttgttcgaagatatcatccaaaacgagtactttaaagaagtagctaatgttgtaaaccacgtactcacggctacggcattagatgagaaattattcctaattaagaaaatggctgaacacgatgtttatggagttagcaatttcaaaatagggatgtttaacctgacatttattaagtcgttggatcataccgttttcccctctctgttagatgaggatagcaaaataaagttttttaaggggaaaaagctcaatattgtagcattacgatctctggaggattgtataaattacgtgactaaatccgagaatatgatagaaatgatgaaggaaagatcgactattttaaatagcatagatatagaaacggaatcggtagatcgtctaaaagaattgcttctaaaatgaaaaaaaacactaattcagaaatggatcaacgactagggtataagtttttggtgcctgatcctaaagccggagttttttatagaccgttacatttccaatatgtatcgtattctaattttatattgcatcgattgcatgaaatcttgaccgtcaagcggccactcttatcgtttaagaataatacagaacgaattatgatagaaattagcaatgttaaagtgactcctccagattactcacctataatcgcgagtattaaaggtaagagttatgacgcattagccacgttcactgtaaatatctttaaagaggtaatgaccaaagagggtatatccatcactaaaataagtagttatgagggaaaagattctcatttgataaaaattccgctactaataggatacgggaataaaaatccacttgatacagccaagtatcttgttcctaatgtcataggtggagtctttatcaataaacaatctgtcgaaaaagtaggaattaatctagtagaaaagattacaacatggccaaaatttagggttgttaagccaaactcattcactttctcgttttcctccgtatcccctcctaatgtattaccgacaagatatcgccattacaagatatctctggatatatcacaattggaagcgttgaatatatcatcgacaaagacatttataacggtcaatattgttttgctgtctcaatatttatctagagtgagtctagaattcattagacgtagtttatcatacgatatgcctccagaagttgtctatctagtaaacgcgataatagatagtgctaaacgaattactgaatctattactgactttaatattgatacatacattaatgacctggtggaagctgaacacattaaacaaaaatctcagttaacgatcaacgagttcaaatatgaaatgctgcataactttttacctcatatgaactatacacccgatcaactaaagggattttatatgatatctttactaagaaagtttctctactgtatcttccacacttctagatatccagatagagattcgatggtttgtcatcgcatcctaacgtacggcaaatattttgagacgttggcacatgatgaattagagaattacataggcaacatccgaaacgatatcatgaacaatcacaagaacagaggcacttacgcggtaaacattcatgtactaacaactcccggacttaatcacgcgttttctagcttattgagtggaaagttcaaaaagtcagacggtagttatcgaacacatcctcactattcatggatgcagaatatttctattcctaggagtgttggattttatccggatcaagtaaagatttcaaagatgttttctgtcagaaaataccatccaagtcaatatctttacttttgttcatcagacgttccggaaagaggtcctcaggtaggtttagtatctcaattgtctgtcttgagttccattacaaatatactaacgtctgagtatttggatttggaaaagaaaatttgtgagtatatcagatcatattataaagatgatataagttactttgaaacaggatttccaatcactatagaaaatgctctagtcgcatctcttaatccaaatatgatatgtgattttgtaactgactttagacgtagaaaacggatgggattcttcggtaacttggaggtaggtattactttagttagggatcacatgaatgaaattcgcattaatattggagcgggaagattagtcagaccattcttggttgtggataacggagagctcatgatggatgtgtgtccggagttagaaagcagattagacgacatgacattctctgacattcagaaagagtttccgcatgtcatcgaaatggtagatatagaacaatttacttttagtaacgtatgtgaatcggttcaaaaatttagaatgatgtcaaaggatgaaagaaagcaatacgatttatgtgactttcctgccgaatttagagatggatatgtagcatcttcattagtgggaatcaatcacaattctggacccagagctattcttggatgtgctcaagctaaacaagctatctcttgtctgagctcggatatacgaaataaaatagacaatggaattcatttgatgtatccagagaggccaatcgtgattagtaaggctttagaaacttcaaagattgcggctaattgcttcggccaacatgttactatagcattaatgtcgtacaaaggtatcaatcaagaggatggaattatcatcaaaaaacaatttattcagagaggcggtctcgatattgttacagccaagaaacatcaagtagaaattccattggaaaactttaataacaaagaaagagataggtctaacgcctattcaaaattagaaagtaatggattagttagactgaatgctttcttggaatccggagacgctatggcacgaaatatctcatcaagaactcttgaagatgattttgctagagataatcagattagcttcgatgtttccgagaaatataccgatatgtacaaatctcgcgttgaacgagtacaagtagaacttactgacaaagttaaggtacgagtattaaccatgaaagaaagaagacccattctaggagacaaatttaccactagaacgagtcaaaagggaacagtcgcgtatgtcgcggatgaaacggaacttccatacgacgaaaatggtatcacaccagatgtcattattaattctacatccatcttctctagaaaaactatatctatgttgatagaagttattttaacagccgcatattctgctaagccgtacaacaataagggagaaaaccgacctgtctgttttcctagtagtaacgaaacatccatcgatacatatatgcaattcgctaaacaatgttatgagcattcaaatccgaaattgtccgatgaagaattatcggataaaatcttttgtgaaaagattctctatgatcctgaaacggataagccttatgcatccaaagtattttttggaccaatttattacttgcgtctgaggcatttaactcaggacaaggcaaccgttagatgtagaggtaaaaagacgaagctcattagacaggcgaatgagggacgaaaacgtggaggaggtatcaagttcggagaaatggagagagactgtttaatagcgcatggtgcagccaatactattacagaagttttgaaagattcggaagaagattatcaagatgtgtatgtttgtgaaaattgtggagacatagcagcacaaatcaagggtattaatacatgtcttagatgttcaaaacttaatctctctcctctcttaacaaaaattgataccacgcacgtatctaaagtatttcttactcaaatgaacgccagaggcgtaaaagtcaaattagatttcgaacgaaggcctccttcgttttataaaccattagataaagttgatctcaagccgtcttttctggtgtaatattctagtttggtagtagatacatatcaatatcatcaaattcgagatccgaattataaaatgggcgtggattgttaactatagaatcggacgtctgatattcgaaaatctgtggagtttcaggttttggtggaggtgtaactgctacttgggatactgaagtctgatattcagaaagctgtggatgttctggttcggcatccaccgatggtgtcacatcactaatcggttcggtaacgtctgtggatggaggtgctacttctacagaacctgtagcctcagttgtcaacggagatacatttttaatgcgagaaaatgtataatttggtaatggtttcttatgtggatctgaagaagaggtaagatatctactagaaagataccgatcacgttctagttctcttttgtagaacttaactttttctttctccgcatctagttgatattccaacctcttcacgttactacgttcagattccaattcacgttcgcatgggttacctccgcagtttttacgagcgatttcacgttcagccttcatgcgtctctccctctctctatcgagtttatcagagcagtctttctgaaggcgatcgaactccataaatttctccaacgctttgattgtttccatagatttccgaagttcagcttttaggactgtgattctttttctttcgaattcacagctggatgtacaaccgtttccattaccgccatctctaagtttcttttctagatcggcaacatttcatccccatgccttttacattcctcgagtctactgtcgtcgaaatatcgttccagctccttttcgacatcaataactttagcacgttgtctctcaagctctcttttgtagttatctgattccctggcacgtttaagatcttcatgcaattgagtcagctcttaacttcctctcttgcttcttcgtcatagtacgcgcaatcactgtgagatccattgttaccacgtctacactcggcgagctcgcgtttaagagattcaatttcccgtttgtattggtccatgtttccattgctaccaccattagatttacaggctgctagttgtcgttcgagatcagaaatacgggttttcttggaattgatttcgtcgatgtacttggcatcgaaacacttattaagttctttttccaattctacgattttatttctttcgcgagtcaattccctcctgtagtaactatctgttttgtcagattcacgctctctacgtagactttcttgcaagttactaatttgttccctagcacgtccgagtttagttttatatgctgaatagagttctgattcatcctttgagcagatctctagcgatcgtttaagattcctaattctagtctttagcctatttacctcctcagaagatgttccgttaccgttgcgtttacactcgttaagctgtctatcaagatccatgattctatctctaagacgttgcatctctctttccatatcagcattgctttcattattacgtctgcagtcactcaactgtctttcaatatctgagattctatctctaagacgtcgcatctctctctgtttcggcattggtttcattattacgtttacagtcgttcaactgtctttcaagatctgatattctagattggagtctgctaatctctgtagcattttcacggcattcactcagttgtctttcaagatctgaaattttagattggagtctgctaatctctgtaagatttcctcctccgctctcgatgcagtcggtcaacttattctctagttctctaatacgcgaacgcagtgcatcaacttcttgcgtgtcttcctggttgcgtgtacattcatcgagatctctaacgcgtcgtcgttcttcctcaagttctctgcgtactacagaaagcgtgtccctatcttgttgatatttagcaatttctgattctagagtactgattttgcttacgtagttactaatagttgtcttggccttatcaagatcctccttgtatttgtcgcattccttgatatccctacgaagtctggacagttcccattcgacattacgacgtttatcgatttcagctcggagatcgtcatcgcgttgttttagccacatacgactgagttcaagttctcgttgacaagatccatctacttttccattcctaatagtatccagttccttttctagttctgaacgcatttctcgttccctatcaagcgattctctcaattctcggatagtcttcttatcaatttctaataaatctgaaccatcatctgtcccattttgaatatccctgtgttctttgatctcttttgtaagtcggtcgattctttcggttttataaacagaatccctttccaaagtcctaatcttactgagtttatcactaagttctgcattcaattcggtgagttttctcttggcttcttccaactctgttttaaactctccactatttccgcattcttcctcgcatttatctaaccattcaattagtttattaataactagttggtaatcagcgattcctatagccgttcttgtaattgtgggaacataattaggatcttctaatggattgtatggcttgatagcatcatctttatcattattagggggatggacaaccttaattggttggtcctcatctcctccagtagcgtgtggttcttcaataccagtgttagtaataggcttaggcaaatgcttgtcgtacgcgggcacttcctcatccatcaagtatttataatcgggttctacttcagaatattcttttctaagagacgcgacttcgggagttagtagaagaactctgtttctgtatctatcaacgctggaatcaatactcaagttaaggatagcgaatacctcatcgtcatcatccgtatcttctgaaacaccatcatatgacatttcatgaagtctaacgtattgataaatagaatcagatttagtattaaacagatccttaacctttttagtaaacgcatatgtatattttagatctccagatttcataatatgatcacatgccttaaatgtcagtgcttccatgatataatctggaacactaatgggtgacgaaaaagatacagcaccatatgctacgttgataaataaatctgaaccactaagtagataatgattaatgttaagaaagaggaaatattcagtgtataggtatgtcttggcgtcatatcttgtactaaacacgctaaacagtttgttaatgtgatcaatttccaatagattaattagagcagcgggaataccaacaaacatattaccacatccgtattttctatgaatatcacatatcatgttaaaaaatcttgatagaagagcgaatatctcgtctgacttaatgagtcgtagttcagcagcaacataagtcataactgtaaatagaacatactttcctgtagtgttgattctagactccacatcaacaccattattaaaaatagttttatatacatctttaatctgctctccgttaatcgtcgaacgttctagtatacggaaacactttgatttcttatctgtagttaatgacttagtgatatcacgaagaatattacgaattacatttcttgtttttcttgagagacctgattcagaactcaactcatcgttccatagtttttctacctcagtggcgaaatctttggagtgcttggtacatttttcaataaggttcgtgacctccatttattataaaaaatttattcaaaacttaactacaatcgggtaattataagatcgtagatctcccatgtggcggaatactaccatctatcgcatgtggatggacagtaggtaatggccatgggaacagtaatgtttgcatatttatctttcttgctagtattactgcatattgtcccaatgtttcgatgtgatgttctaacctatcaactgccgctgtatcacaacaatagtgtccgatgaaattaagattatgatccaatgtgtttaatatatgattatcaagtcttatacgatccgcgtcttttttgacaggatcaggttcttctacaggaagaagtttcggcctcttatgatattcatgtctgggaaacggtggtctagggtgaggctccggtatcggagtgggttttggattataatcatcatcgtctatgacatcatcttcgacttcgatatttattttgctatcttgatgatgtcctgtatcagttgcattttcagcactcgactgaatattagcgcattcattgtctattattaccatatttctaaacccaaaatgtatgtgttgaacatcagtactatcgttgatgagtcttatagcatgaattcgcttatcgttatcgggtttatcttctgtcaccttagcaattccttttttattaaactctacataatcatatccatttctattgtttgttctaatataaacgagtatagcatcattgctaaatttttcaatagtatcaaaaacagaatatcctaaaccatataatatatattcaggaacactcaaactaaatgtccaggattctcctaaatacgtaaactttaatagtgcgaaatcattcaaaaatctaccacttatagatagatagtacataaatgcgtatagtagtctacctatctctttattatgaaaaccggcattacgatcatatatgtcgtgatatacctgtgatccgtttacgttaaaccataaatacatgggtgatcctataaacatgaatttatttctaattctcagagctatagttaattgaccgtgtaatatttgcttacatgcatacttgatacgcttattaataagatttttatcattgctcgttatttcagaatcgtatatataaggagtaccatcgtgattcttaccagatattatacaaaatactatatataaaatatattgacccacgttagtaatcatataaatgtttaacgttttaaattttgtattcaatgatccattatcatacgctatcatggtcttgtaatattcattctttaaaatataatattgtgttagccattgcattggagctcctaatggagattttctattctcatccattttaggataggctttcataaagtccctaataacttcgtgaataatgtttctatgttttctactgatgcatgtatttgcttcgatttttttatcccatgtttcatctatcatagatttaaacgcagtaatgctcgcaacattaacatcttgaaccgttggtacaattccgttccataaatttataatgttcgccatttatataactcattttttgaatatacttttaattaacaaaagagttaagttactcatatggacgccgtccagtctgaacatcaatctttttagccagagatatcatagccgctcttagagtttcagcgtgattttccaacctaaatagaacttcatcgttgcgtttacaacacttttctatttgttcaaactttgttgttacattagtaatctttttttccaaattagttagccgttgtttgagagtttcctcattgtcgtcttcatcggctttaacaattgcttcgcgtttagcctctggctttttagcagcctttgtagaaaaaaattcagttgctggaattgcaagatcgtcatctccggggaaaagagttccgtccatttaaagtacagattttagaaactgacactctgcgttatttatatttggtacaacacatggattataaatattgatgttaataacatcagaaaatgtaaagtctatacattgttgcatcgtgttaaattttctaatggatctagtattattgggtccaacttctgcctgaaatccaaatatggaagcggatacaaaaccgtttcctggataaaccacacatctccacttttgctttacatcagaaattgtgtcgttgacatcttgaactctcctatctaatgccggtgttccacctatagattttgaatattcgaatgctgcatgagtagcattaaattccttaatattgccataattttcatatattgagtaaccctggataaaaagtaaacacaccgcagccgtcgctaccacaataaaaaaaattgatagagagttcatttataatctattagaagctgacaaaatttttttacacgcatcagacaatgctttaataaatagttcaacatctacttttgtcatatcgaaccgatggtatgattctaacctagaattacatccgaaaaagttgactatgttcatagtcattaagtcattaacaaacaacattccagactctggattataagacgatactgtttcgtcacaattacctaccttaatcatgtgattatgaatattggctattagagcaccttctaagaaatctataatatctttgaaacacgatttaaaatcaaaccacgaatatacttctacgaagaaagttagtttacccataggagaaataactataaatggagatctaaatacaaaatccggatctatgatagttttaacattattatattctctattaaatacctccacatctaaaaatgttaattttgaaactatgtcttcgtttattaccgtacctgaactaaacgctataagctctattgtttgagaactctttaaacgatattcttgaaatacatgtaacaaagtttcctttaactcggtcggtttatctaccatagttacagaatttgtatccttatctataatataataatcaaaatcgtataaagttatataattatcgcgttcagattgtgatcttttcaaatagactaaaaaccccatttctctagtaagtatcttatgtatatgtttgtaaaatatcttcatggtgggaatatgctctaccgcagttagccattcctcattgacagcggtagatgtattagacaaaactattccaatgtttaacaagggccattttacgagattattaaatccttgtttgataaatgtagccaatgagggttcgagttcaacgacgattgaattctcttcccgcggatgctgcatgatgaacgacgggatgttgttcgattgatttggaattctttttcgactttttgtttatattaaatattttaaaatttatagcggatagcaattcatgtaccacggataatgtagacgcgtattgcgcatcgatatctttattattagataaatttatcaataaatgtgagaagtttgcctcgttaaggtcttccatttaaatattatataaacatttgtgtttgtatcttattcgtcttttatggaatagttttttactagtaaagctgcaattacacactttgtccgtaaaacataaatataaacaccagcttttatcaatcgttccaaaaagtcgacggcggacatttttaacatggcatctattttaaatacacttaggtttttggaaaaaacatcattttataattgtaacgattcaataactaaagaaaagattaagattaaacataagggaatgtcatttgtattttataagccaaagcattctaccgttgttaaatacttgtctggaggaggtatatatcatgatgatttggttgtattggggaaggtaacaattaataatctaaagatgatgctattttacatggatttatcatatcatggagtgacaagtagtggagcaatttacaaattgggatcgtctatcgatagactttctctaaataggactattgttacaaaagttaataattatgatgatacattttttgacgacgatgattgatcgctattgcacaattttgtttttgtactttctaatatagtgtttaggttctttttcatatgagaatattgatttactaaaatatctatgtttaacttttgttctatgacgtccttatcggcggtatcggtacatatacgtaattcaccttcacaaaatacggagtcttcgataataatagccaatcgattattggatctagctgtctgtatcatattcaacatgtttaatatatcctttcgtttcccctttacaggcatcgatcgtagcatattttccgcgtctgatatggaaatgttaaaactacaaaaatgcgtaatgttagcccgtcctaatattggtacgtgtctataagtttggcatagtagaataatagacgtgtttaaatgccttccaaagtttaagaattctattagagtattgcattttgatagtttatcgcctacatcatcaaaaataagtaaaaagtgtgctgattttttatgattttgtgcgacagcaatacatttttctatgttacttttagttcgtatcagattatattctagagattcctgactactaacgaaattaatatgatttggccaaatgtatccatcataatctgggttataaacgggtgtaaacaagaatatatgtttatattttttaactagtgtagaaaacagagatagtaaatagatagtttttccagatccagatcctcctgttaaaaccattctaaacggcatttttaataaattttctcttgaaaattgtttttcttggaaacaattcataattatatttacagttactaaattaatttgataataaatcaaaatatggaaaactaaggttgttagtagggaggagaacaaagaaggcacatcgtgatataaataacatttattatcatgatgacaccagaaaacgacgaagagcagacatctgtgttctccgctactgtttacggagacaaaattcagggaaagaataaacgcaaacgcgtgattggtctatgtattagaatatctatggttatttcactactatctatgattaccatgtccgcgtttctcatagtgcgcctaaatcaatgcatgtctgctaacgaggctgctattactgacgccgctgttgccgttgctgctgcatcatctactcatagaaaggttgcgtctagcactacacaatatgatcacaaagaaagctgtaatggtttatattaccagggttcttgttatatattacattcagactaccagttattctcggatgctaaagcaaattgcactgcggaatcatcaacactacccaataaatccgatgtcttgactacctggctcattgattatgttgaggatacatggggatctgatggtaatccaattacaaaaactacatccgattatcaagattctgatgtatcacaagaagttagaaagtatttttgtgttaaaacaatgaactaatatttatttttgtacattaataaatgaaatcgcttaatagacaaactgtaagtaggtttaagaagttgtcggtgccggccgctataatgatgatactctcaaccattattagtggcataggaacatttctgcattacaaagaagaactgatgcctagtgcttgcgccaatggatggatacaatacgataaacattgttatttagatactaacattaaaatgtctacagataatgcggtttatcagtgtcgtaaattacgagctagattgcctagacctgatactagacatctgagagtattgtttagtattttttataaagattattgggtaagtttaaaaaagaccaatgataaatggttagatattaataatgataaagatatagatattagtaaattaacaaattttaaacaactaaacagtacgacggatgctgaagcgtgttatatatacaagtctggaaaactggttaaaacagtatgtaaaagtactcaatctgtactatgtgttaaaaaattctacaagtgacaacaaaaaatgaattaataataagtcgttaacgtacgccgccatggacgccgcgtttgttattactccaatgggtgtgttgactataacagatacattgtatgatgatctcgatatctcaatcatggactttataggaccatacattataggtaacataaaaactgtccaaatagatgtacgggatataaaatattccgacatgcaaaaatgctactttagctataagggtaaaatagttcctcaggattctaatgatttggctagattcaacatttatagcatttgtgccgcatacagatcaaaaaataccatcatcatagcatgcgactatgatatcatgttagatatagaagataaacatcagccattttatctattcccatctattgatgtttttaacgctacaatcatagaagcgtataacctgtatacagctggagattatcatctaatcatcaatccttcagataatctgaaaatgaaattgtcgtttaattcttcattctgcatatcagacggcaatggatggatcataattgatgggaaatgcaatagtaattttttatcataaaagttgtaaagtaaataataaaacaataaatattgaactagtagtacgtatattgagcaatcagaaatgatgctggtacctcttatcacggtgaccgtagttgcgggaacaatattagtatgttatatattatatatttgtaggaaaaagatacgtactgtctataatgacaataaaattatcatgacaaaattaaaaaagataaagagttctaattccagcaaatctagtaaatcaactgatagcgaatcagactgggaggatcactgtagtgctatggaacaaaacaatgacgtagataatatttctaggaatgagatattggacgatgatagcttcgctggtagtttaatatgggataacgaatccaatgttatggcgcctagcacagaacacatttacgatagtgttgctggaagcacgctgctaataaataatgatcgtaatgaacagactatttatcagaacactacagtagtaattaatgaaacggagactgttgaagtacttaatgaagataccaaacagaatcctaactattcatccaatcctttcgtaaattataataaaaccagtatttgtagcaagtcaaatccgtttattacagaacttaacaataaatttagtgagaataatccgtttagacgagcacatagcgatgattatcttaataagcaagaacaagatcatgaacacgatgatatagaatcatcggtcgtatcattggtgtgattagtttcctttttataaaattgaagtaatatttagtattattgctgccgtcacgttgtacaaatggagatattccctgtattcggcatttctaaaattagcaattttattgctaataatgactgtagatattatatagatacagaacatcaaaaaattatatctgatgagatcaatagacagatggatgaaacggtacttcttaccaacatcttaagcgtagaagttgtaaatgacaatgagatgtaccatcttattcctcatagattatcgacgattatactctgtattagttctgtcggaggatgtgttatctctatagataatgacatcaatggcaaaaatattctaacctttcccattgatcatgctgtaatcatatccccactgagtaaatgtgtcgtagttagcaagggtcctacaaccatattggttgttaaagcggatatacctagcaaacgattggtaacatcgtttacaaacgacatactatatgtaaacaatctgtcactgattaattatttgccgttgtctgtattcattattagacgagtcaccgactatttggatagacacatatgcgatcagatatttgctaataataagtggtattcccttataaccatcgacgataagcaatatcctattccatcaaactgtataggtatgtcctctgccaagtacataaattctagcatcgagcaagatactttaatccatgtttgtaacctcgagcatccgttcgactcagtatacaaaaaaatgcagtcgtacaattctctacctatcaaggaacaaatattgtacggtagaattgataatataaatatgagcattagtatttctgtggattaatagatttctagtatggggatcattaatcatctctaatctctaaatacctcataaaacgaaaaaaaagctattatcaaatactgtacggaatggattcattctcttctctttttatgaaactctgttgtatatctactgataaaactggaagcaaaaaatctgatagaaagaataagaataagatcaaggattatatggaacacgattattataaaataacaatagttcctggttcctcttccacgtctactagctcgtggtattatacacatgcctagtaatagtctctttgcgttgacggaaagcagactagaaataacaggctaaaatgttcagacaccataatagttcccaacccagataataacagagttccatcaacacattcctttaaactcaatcccaaacccaaaaccgttaaaatgtatccggccaattgatagtagataatgaggtgtacagcgcatgataatttacacagtaaccaaaatgaaaatactttagtaattataagaaatatagacggtaatgtcatcatcaacaatccgataatatgcctgagagtaaacattgacggataaaacaaaaatgctccgcataactctatcatggcaataacacaaccaaatacttgtaagattcctaaattagtagaaaatacaacgaatatcgatgtataagtgatctcgagaaataataagaataaagtaatgcccgtaaagataaacatcaacattgtttggtaatcattaaaccaattagtatgaagttgaactaatttcacagtagattttattccagtgttatcctcgcatgtataagtacctggtaagatatctttatattccataatcaatgagacatcactatctgataacgaatgaagtctagcactagtatgccatttacttaatattgtcgtcttggaagttttattataagttaaaatatcatggttatccaatttccatctaatatactttgtcggattatctatagtacacggaataatgatggtatcattacatgctgtatactctatggtctttgtagttgttataacaaccaacgtatagaggtatatcaacgatattctaactcttgacattttttatttatttaaaatgatacctttgttatttattttattctattttgctaacggtattgaatggcataagtttgaaacgagtgaagaaataatttctacttacttattagacgacgtattatacacgggtgttaatggggcggtatacacattttcaaataataaactaaacaaaactggtttaactaataataattatataacaacatctataaaagtagaggatgcggataaggatacattagtatgcggaaccaataacggaaatcccaaatgttggaaaatagacggttcagacgacccaaaacatagaggtagaggatacgctccttatcaaaatagcaaagtaacgataatcagtcacaacggatgtgtactatctgacataaacatatcaaaagaaggaattaaacgatggagaagatttgacggaccatgtggttatgatttattcacggcggataacgtaattccaaaagatggtttacgaggagcattcgtcgataaagacggtacttatgacaaagtttacattcttttcactgatactatcggctcaaagagaattgtcaaaattccgtatatagcacaaatgtgcctaaacgacgaaggtggtccatcatcattgtctagtcatagatggtcgacgtttctcaaagtcgaattagaatgtgatatcgacggaagaagttatagacaaattattcattctagaactataaaaacagataatgatacgatactatatgtattcttcgatagtccttattccaagtccgcattatgtacctattctatgaataccattaaacaatctttttctacgtcaaaattggaaggatatacaaagcaattgccgtctccagctcctggtatatgtttaccagctggaaaagttgttccacataccacgtttgaagtcatagaacaatataatgtactagatgatattataaagcctttatctaaccaacctatcttcgaaggaccgtctggtgttaaatggttcgatataaaggagaaggaaaatgaacatcgggaatatagaatatacttcataaaagaaaattctatatattcgttcgatacaaaatctaaacaaactcgtagctcgcaagtcgatgcgcgactattttcagtaatggtaactgcgaaaccgttatttatagcagatatagggataggagtaggaatgccacaaatgaaaaaaatacttaaaatgtaatcttaatcgagtacaccacacgacaatgaacaaacataagacagattatgctggttatgcttgctgcgtaatatgcggtctaattgtcggaattatttttacagcgacactattaaaagttgtagaacgtaaattagttcatacaccattaatagataaaacgataaaagatgcatatattagagaagattgtcctactgactggataagctataataataaatgtatccatttatctactgatcgaaaaacctgggaggaaggacgtaatgcatgcaaagctctaaattcaaattcggatctaattaagatagagactccaaacgagttaagttttttaagaagccttagacgaggctattgggtaggagaatccgaaatattaaaccagacaaccccatataattttatagctaagaatgccacgaagaatggaactaaaaaacggaaatatatttgtagcacaacgaatactcccaaactgcattcgtgttacactatataacaattacactacatttttatcataccactacttcggttagatgttttagaaaaaaataaatatcgccgtaccgttcttgtttttataaaaataacaattaacaattatcaaattttttctttaatattttacgtggttgaccattcttggtggtaaaataatctcttagtgttggaatggaatgctgtttaatgtttccacactcatcgtatattttgacgtatgtagtcacatcgtttacgcaatagtcagactgtagttctatcatgcttcctacatcagaaggaggaacagttttaaagtctcttggttttaatctattaccgttagttttcatgaaatcctttgttttatccacttcacattttaaataaatgtccactatacattcttttgttaattttactagatcgtcatgggtcatagaatttataggttccgtagtccatggatccaaactagcaaacttcgcgtatacggtatcgcgattagtgtatacaccaactgtatgaaaattaagaaaacagtttaataaatcaacagaaatatttaatcctccgtttgatacagatgcgccatatttatggatttcggattcacacgttgtttgtctgaggtgttcgtctagtgttgcttctacgtaaacttcgattcccatatattctttattgtcagaatcgcataccgatttatcatcatacactgtttgaaaactaaatggtatacacatcaaaataataaataataacgagtacattctgcaatattgttatcgtaattggaaaaatagtgttcgagtgagttggattatgtgagtattggattgtatattttattttatattttgtaataagaataaaatgctaatgtcaagtttattccaatagatgtcttattaaaaacatatataataaataacaatggctgaatggcataaaattatcgaggatatctcaaaaaataataagttcgaggatgccgccatcgttgattacaagactacaaagaatgttctagctgctattcctaacagaacatttgccaagattaatccgggtgaaattattcctctcatcactaatcgtaatattctaaaacctcttattggtcagaaatattgtattgtatatactaactctctaatggatgagaacacgtatgctatggagttgcttactgggtacgcccctgtatctccgatcgttatagcgagaactcataccgcacttatatttttgatgggtaagccaacaacatccagacgtgacgtgtatagaacgtgtagagatcacgctacccgtgtacgtgcaactggtaattaaaataaaaagtaatattcatatgtagtgtcaattttaaatgatgatgatgaaatggataatatccatattgacgatgtcaataatgccggtattggcatacagttcatcgatttttagatttcattcagaggatgtggaattatgttatgggcatttgtattttgataggatctataatgtagtaaatataaaatataatccgcatattccatatagatataattttattaatcgcacgttaaccgtagatgaactagacgataatgtcttttttacacatggttattttttaaaacacaaatatggttcacttaatcctagtttgattgtctcattatcaggaaacttaaaatataatgatatacaatgctcagtaaatgtatcgtgtctcattaaaaatttggcaacgagtacatctactatattaacatctaaacataagacttattctctacatcggtccacgtgtattactataataggatacgattctattatatggtataaagatataaatgacaagtataatgacatctatgattttactgcaatatgtatgctaatagcgtctacattgatagtgaccatatacgtgtttaaaaaaataaaaatgaactcttaattatgctatgctattagaaatggataaaatcaaaattacggttgattcaaaaattggtaatgttgttaccatatcgtataacttggaaaagataactattgatgtcacacctaaaaagaaaaaagaaaaggatgtattattagcgcaatcagttgctgtcgaagaggcaaaagatgtcaaggtagaagaaaaaaatattatcgatattgaagatgacgatgatatggatgtagaaagcgcgtaatacgatctataaaaataagtatataaatactttttatttactgtactcttactgtgtagtggtgataccctactcgattatttttttaaaaaaaaaatacttattctgattcttctagccatttccgtgttcgtttgaatgccacatcgacgtcaaagataggggagtagttgaaatctagttctgcattgttggtacgcacctcaaatgtagtgttggatatcttcaacgtatagttgttgagtagtgatggttttctaaatagaattctcttcatatcattcttgcacgcgtacatttttagcatccatcttggaatcctagatccttgttctattcccaatggtttcatcaatagaagattaaacatatcgtacgaacacgatggagagtaatcgtagcaaaagtaagcatttcctttaatcttagatcccggatactggatatattttgcagccaacacgtgcatccatgcagcatttcctacatatacccggctatgcaccgcgtcatcatcgactgtacgatacataatgttaccgtgttgcttacattgctcgtaaaagactttcatcaatttgtctccttctccgtaaattccagtgggtcttaggcaacaagtatacaattttgctccattcatgattacggaattattggctttcataaccagttgctcggccatacgtttactttttgcgtatacatgtcctggtgatatatcataaagggtatgctcatggccgatgaatggatcaccgtgtttattgggtcctattgcttccatgctactagtatagatcaaatacttgattcctaggtccacacaagctgccaaaatagtctgtgttccataatagtttactttcatgatttcattatcggtgtattttccaaatacatccactagagcagccgtatgaataatcagatttaccccatctagcgcttctctcaccttatcaaagtcgtttatatcacattgtatatagtttataaccttaactttcgaggttattggttgtggatcttctacaatatctatgactctgatttcttgaacatcatctgcactaattaacagttttactatatacctgcctagaaatccggcaccaccagtaaccgcgtacacggccattgctgccactcataatatcagactacttattctattttactaaataatggctgtttgtataatagaccacgataatatcagaggagttatttactttgaaccagtccatggaaaagataaagttttaggatcagttattggattaaaatccggaacgtatagtttgataattcatcgttacggagatattagtcaaggatgtgattccataggcagtccagaaatatttatcggtaacatctttgtaaacagatatggtgtagcatatgtttatttagatacagatgtaaatatatttacaattattggaaaggcgttatctatttcaaaaaatgatcagagattagcgtgtggagttattggtatttcttacataaatgaaaagataatacattttcttacaattaacgagaatggcgtttgatatatcagttaatgcgtctaaaacaataaatgcattagtttacttttctactcagcaaaataaattagtcatacgtaatgaagttaatgatacacactacactgtcgaatttgatagggacaaagtagttgacacgtttatttcatataatagacataatgacaccatagagataagaggggtgcttccagaggaaactaatattggttgcgcggttagtatgacttacttgtataataagtatagttttaaactgattttagcagaatatataagacacagaaatactatatccggcaatatttattcggcattgatgacactagatgatttggctattaaacagtatggagacattgatctattatttaatgagaaacttaaagtagactccgattcgggactatttgactttgtcaactttgtaaaggatatgatatgttgtgattctagaatagtagtagctctatctagtctagtatctaaacattgggaattgacaaataaaaaatataggtgtatggcattagccgaacatatatctgatagtattccaatatctgagctatctagactacgatacaatctatgtaagtatctacgcggacacactgagagcatagaggataaatttgattattttgaagacgatgattcgtctacatgttctgccgtaaccgacagggaaacggatgtataattttttttatagcgtgaaggatatgataaaaaatataattgttgtatttatcccattccaatcaccttatatgattctgtaacacaataaaggagtcttatagatgtatagaggtcagatactggtttgataaactgtttattccacataagtatgtttgactttatggttagacccgcatactttaacaaatcactgaaaattggagttaggtattgacctctcagaatcagttgccgttctggaacattaaatgtattttttatgatatactccaacgcatttatgtgggcatacaacaagtcattactaatggaatattccaagagttttagttgtctagtatttaacaagagaagagatttcaacagactgtttatgaactcgaatgccgcctcattgtcgcttatattgatgatgtcgaattctcccaatatcatcaccgatgagtagctcatcttgttatcgggatccaagttttctaaagatgtcattaaaccctcgatcatgaatggatttatcatcatcgtttttatgttggacatgagcttagtccgtttgtccacatctatagaagatgatttctgaattatttcatatatctctctctttaactccaggaacttgtcaggatggtctactttaatatgttctcgtctaagagatgaaaatctttggatggttgcacgcgacttttctctaaaggatgacgttgcccaagatcctctcttaaatgaatccatcttatccttggacaagatggacagtctattttccttagatggtttaatatttttgttacccatgatctataaaggtagacctaatcgtctcggatgaccatatatttattttcagttttattatacgcataaattgtaaaaaatatgttaggtttacgaaaatgtctcgtggggcattaatcgtttttgaaggattggacaaatctggaaaaacaacacaatgtatgaacatcatggaatcaataccttcaaacacaataaaataccttaactttcctcagagatccactgtcactggaaagatgatagatgactatctaactcgtaaaaaaacctataatgatcatatagttaatctattattttgtgcaaatagatgggagtttgcatcttttatacaagaacaactagaacagggaattactttaatagttgatagatacgcattttctggagtagcgtatgccgccgctaaaggcgcgtcaatgactctcagtaagagttatgaatctggattgcctaaacccgacttagttatattcttggaatctggtagcaaagaaattaatagaaacgtcggtgaggaaatttatgaagatgttacattccaacaaaaggtattacaagaatataaaaaaatgattgaagaaggagatattcattggcaaattatttcttctgaattcgaggaagatgtaaagaaggagttgattaagaatatagttatagaggctatacacacggttactggaccagtggggcaactgtggatgtaatagtgaaattacattttttataaatagatgttagtacagtgttataaatggatgaagcatattactctggcaacttggaatcagtactcggatacgtgtccgatatgcataccgaactcgcatcaatatctcaattagttattgccaagatagaaactatagataatgatatattaaacaaggacattgtaaattttatcatgtgtagatcaaacttggataatccatttatctctttcctagatactgtatatactattatagatcaagagaactatcagactgagttgattaattcattagacgacaatgaaattatcgattgtatagttaataagtttatgagcttttataaggataacctagaaaatatagtagatgctatcattactctaaaatatataatgaataatccagattttaaaactacgtatgccgaagtactcggttccagaatagccgatatagatattaaacaagtgatacgtaagaatatactacaattgtctaataatatccgcgaacgatatttgtgaaaatattaaaaaaaaatactttttttattaaatgacgtcttttcgtgaatttagaaaattatgctgtgctatatatcacgcatcaggatataaagaaaaatctaaattaattagagactttataacagatagggatgataaatatttgatcattaagctattgcttcccggattagacgatagaatttataacatgaacgataaacaaattataaaattatatagtataatatttaaacaatctcaggaagatatgctacaagatttaggatacggatatataggagacactattaggactttcttcaaagagaacacagaaatccgtccacgagataaaagcattttaactttagaagaagtggatagttttttaactacgttatcatccgtaactaaagaatcgcatcaaataaaattattgactgatgtagcatctgtttgtacatgtaatgatttaaaatgtgtagtcatgcttattgataaagatctaaaaattaaagcgggtcctcggtacgtacttaacgctattagtcctaatgcctatgatgtgtttagaaaatctaataacttgaaagagataatagaaaattcatctaaacaaaatctagactctatatctatttctgttatgactccaattaatcccatgttagcggaatcgtgtgattctgtcaataaggcgtttaaaaaatttccatcaggaatgtttgcggaagtcaaatacgatggtgaaagagtacaagttcataaaaataataacgagtttgccttctttagtagaaacatgaaaccagtactctctcataaagtggattatctcaaagaatacataccgaaagcatttaaaaaagctacgtctatcgtattggattctgaaattgttcttgtagacgaacataatgtaccgctcccgtttggaagtttaggtatacacaaaaagaaagaatataaaaactctaacatgtgtttgttcgtgtttgactgtttgtactttgatggattcgatatgacggacattccattgtacgaacgaagatcttttctcaaagatgttatggttgaaatacccaatagaatagtattctcagagttgacgaatattagtaacgagtctcagttaactgacgtattggatgatgcactaacgagaaaattagaaggattggtcttaaaagatattaatggagtatacgaaccgggaaagagaagatggttaaaaataaagcgagactatttgaacgagggttccatggcagattctgccgatttagtagtactaggtgcctactatggtaaaggagcaaagggtggtatcatggcagtctttctaatgggttgttacgacgatgaatccggtaaatggaagacggttaccaagtgttcaggacacgatgataatacgttaagggagttgcaagaccaattaaagatgattaaaattaacaaggatcccaaaaaaattccagagtggttagtagttaataaaatctatattcccgattttgtagtagaggatccgaaacaatctcagatatgggaaatttcaggagcagagtttacatcttccaagtcccataccgcaaatggaatatccattagatttcctagatttactaggataagagaggataaaacgtggaaagaatctactcatctaaacgatttagtaaacttgactaaatcttaatagttacatacaaactgaaaattaaaataacactatttagttggtggtcgccatggatggtgttattgtatactgtctaaacgcgctagtaaaacatggcgaggaaataaatcatataaaaaatgatttcatgattaaaccatgttgtgaaagagtttgtgaaaaagtcaagaacgttcacattggcggacaatctaaaaacaatacagtgattgcagatttgccatatatggataatgcggtatccgatgtatgcaattcactgtataaaaagaatgtatcaagaatatccagatttgctaatttgataaagatagatgacgatgacaagactcctactggtgtatataattattttaaacctaaagatgccattcctgttatcatatctataggaaaggataaagatgtctgtgaactattaatctcatcagacatatcgtgtgcatgcgtggagttaaattcatatcacgtagccattcttcccatggatgtttccttttttaccaaaggaaatgcatcattgattattctcctgtttgatttctctatcgatgcggcacctctcttaagaagtgtaaccgataataatgttattatatctagacaccagcgtctacatgacgagcttccgagttccaattggttcaagttttacataagtataaagtccgactattgttctatattatatatggttgttgatggatctgtgatgcatgcgatagctgataatagaactcacgcaattattagcaaaaatatattagacaatactacgattaacgatgagtgtagatgctgttattttgaaccacagattaggattcttgatagagatgagatgctcaatggatcatcgtgtgatatgaacagacattgtattatgatgaatttacctgatgtaggcgaatttggatctagtatgttggggaaatatgaacctgacatgattaagattgctctttcggtggctggtaatttaataagaaatcgagactacattcccgggagacgaggatatagctactacgtttacggtatagcctctagataatttttttaagcacgaaataaaaaacataattttaaaccaatctatttcatactattttgtgtgatcaccatggacataaagatagatattagtatttctggtgataaatttacggtgactactaggagggaaaatgaagaaagaaaaaaatatctacctctccaaaaagaaaaaactactgatgttatcaaacctgattatcttgagtacgatgacttgttagatagagatgagatgtttactattctagaggaatattttatgtacagaggtctattaggcctcagaataaaatatggacgactctttaacgaaattaaaaaattcgacaatgatgcggaagaacaattcggtactatagaagaactcaagcagaaacttagattaaattctgaagagggagcagataactttatagattatataaaggtacaaaaacaggatatcgtcaaacttactgtatacgattgcatatctatgataggattgtgtgcatgcgtggtagatgtttggagaaatgagaaactgttttctagatggaaatattgtttacgagcgattaaactgtttattgatgatcacatgcttgataagataaaatctatactgcagaatagactagtatatgtggaaatgtcatagaaagttaaaagttaatgagagcaaaaatatataaggttgtattccatatttgttatttttttctgtaatagttagaaaaatacattcgatggtctatctatcagattattatgtgttataaggtactttttctcataataaactagagtatgagtaagatagtgtttttcaaaacatataaatctaaaattgatggatgagatatacagctattaatttcgaaaatatattttaatctgataactttaaacatggatttttaatggtggtttaacgttttaaaaaaagattttgttattgtagtatatgataatattaaaagatggatataaagaatttgctgactgcatgtactattttttacattactacattggctacggcagatatacctacttcgtcactgccacacgctccggtaaacggggcatgtgacgagggagaatatcttgataagaggcataatcaatgttgtaatcagtgtccacctggagaatttgccaaggttagatgtaatggtaacgataacacaaaatgtgaacgctgcccacctcatacatataccgcaatccccaattactctaatggatgtcatcaatgtagaaaatgcccaacaggatcatttgataaggtaaagtgtaccggaacacagaacagtaaatgttcgtgtcttcctggttggtattgcgctactgattcttcacagactgaagattgtcgagattgtataccaaaaaggagatgtccatgcggatactttggtggaatagatgaacaaggaaatcctatttgtaaatcgtgttgtgttggtgaatattgcgactacctacgtaattatagacttgatccatttcctccatgcaaactatctaaatgtaattaattatgattttgatgataatgttaccatacattatatcgctacttggttagtgtattattcagtatgaagacctattaataattacttatcttttgacgatcttgttataattataatataaaaatacttatggcatagtaactcataattgctgacgcgataaattcgtaataatctgttttgttcaaatttttataaggaatctacaggcataaaaataaaaatataatttataatatactcttacagcgcgccatcatgaataacagcagtgaattgattgctgttattaatggatttagaaatagtggacgattttgtgatattaatatagttattaatgatgaaaggataaacgctcacagactcatcctatctggagcctccgaatatttttccattctgttttccaataattttatcgattctaatgaatacgaagttaatctaagtcatttagattatcaaagtgttaacgatttgatcgattacatttatgggatacctttgagcctaactaacgataacgtgaaatatattctttcaaccgctgattttttacaaattggatctgctattacggagtgtgaaaattacatacttaaaaatctttgttctagaaactgtatcgatttctacatatacgctgataaatataataacaagaaaatagaatcagcgtcgtttaacacaatattacaaaatattttgagactcatcaacgatgaaaactttaaatacttaacagaggaatcaatgataaaaattttaagcgatgatatgttaaatataaaaaatgaggatttcgccccactaattctcattaaatggttagagagtactcaacaaccatgcaccgtcgagttacttaaatgcctcagaatatcattgctttccccacaagttataaaatcactttatagtcatcgactggttagttcaatctacgaatgtataacattcttaaacaatatagcattcttggatgaatcatttcctagataccatagcatcgagttgatatctatcggtataagtaattcgcatgataagatttccataaactgctacaatcataaaaaaaatacatgggaaatgatatcttcacgtagatataggtgtagtttcgcagtggccgtcctggataatattatctatatgatgggtggatatgatcagtccccgtatagaagttcaaaggttatagcgtacaatacatgtacaaattcttggatatatgatataccagagctaaaatatcctcgttctaattgtgggggactggctgatgacgaatacatttattgtataggcggcatacgcgatcaggattcatcgttgacatctagtattgatagatggaagccatcaaaaccatattggcagaagtatgctaaaatgcgcgaaccaaaatgtgatatgggggttgcgatgttaaacggattaatatatgttataggtggaatcgttaaaggtgacacgtgtaccgacgcactagagagtttatcagaagatggatggatgaagcatcaacgtcttccaataaaaatgtccaatatgtcgacgattgttcatgatggcaagatttatatatctggaggttacaacaatagtagtgtagttaatgtaatatcgaatctagtccttagctataattcgatatatgatgaatggaccaaattatcatcattaaacattcctagaattaatcccgctctatggtcagcgcataataaattatatgtaggaggaggaatatctgatgatgttcgaactaatacatctgagacatacgacaaagaaaaagattgttggacattggataatggtcacgtgttaccacgcaattatataatgtataaatgcgaaccgattaaacataaatatccattggaaaaaacacagtacacgaatgattttctaaagtatttggaaagttttataggtagttgatagaacaaaatacataattttgtaaaaataaatcactttttatactaatatgacacgattaccaatacttttgttactaatatcattagtatacgctacaccttttcctcagacatctaaaaaaataggtgatgatgcaactctatcatgtaatcgaaataatacaaatgactacgttgttatgagtgcttggtataaggagcccaattccattattcttttagctgctaaaagcgacgtcttgtattttgataattataccaaggataaaatatcttacgactctccatacgatgatctagttacaactatcacaattaaatcattgactgctagagatgccggtacttatgtatgtgcattctttatgacatcaactacaaatgacactgataaagtagattatgaagaatactccacagagttgattgtaaatacagatagtgaatcgactatagacataatactatctggatctacacattcaccggaaactagttctaagaaacctgattatatagataattctaattgctcgtcggtattcgaaatcggtacccggggatcagcttgcatgcctgcagcaattcccgaggctgtagccgacgatggtgcgccaggagagttgttgattcattgtttgcctccctgctgcggtttttcaccgaagttcatgccagtccagcgtttttgcagcagaaaagccgccgacttcggtttgcggtcgcgagtgaagatccctttcttgttaccgccaacgcgcaatatgccttgcgaggtcgcaaaatcggcgaaattccatacctgttcaccgacgacggcgctgacgcgatcaaagacgcggtgatacatatccagccatgcacactgatactcttcactccacatgtcggtgtacattgagtgcagcccggctaacgtatccacgccgtattcggtgatgataatcggctgatgcagtttctcctgccaggccagaagttctttttccagtaccttctctgccgtttccaaatcgccgctttggacataccatccgtaataacggttcaggcacagcacatcaaagagatcgctgatggtatcggtgtgagcgtcgcagaacattacattgacgcaggtgatcggacgcgtcgggtcgagtttacgcgttgcttccgccagtggcgcgaaatattcccgtgcaccttgcggacgggtatccggttcgttggcaatactccacatcaccacgcttgggtggtttttgtcacgcgctatcagctctttaatcgcctgtaagtgcgcttgctgagtttccccgttgactgcctcttcgctgtacagttctttcggcttgttgcccgcttcgaaaccaatgcctaaagagaggttaaagccgacagcagcagtttcatcaatcaccacgatgccatgttcatctgcccagtcgagcatctcttcagcgtaagggtaatgcgaggtacggtaggagttggccccaatccagtccattaatgcgtggtcgtgcaccatcagcacgttatcgaatcctttgccacgcaagtccgcatcttcatgacgaccaaagccagtaaagtagaacggtttgtggttaatcaggaactgttcgcccttcactgccactgaccggatgccgacgcgaagcgggtagatatcacactctgtctggcttttggctgtgacgcacagttcatagagataaccttcacccggttgccagaggtgcggattcaccacttgcaaagtcccgctagtgccttgtccagttgcaaccacctgttgatccgcatcacgcagttcaacgctgacatcaccattggccaccacctgccagtcaacagacgcgtggttacagtcttgcgcgacatgcgtcaccacggtgatatcgtccacccaggtgttcggcgtggtgtagagcattacgctgcgatggattccggcatagttaaagaaatcatggaagtaagactgctttttcttgccgttttcgtcggtaatcaccattcccggcgggatagtctgccagttcagttcgttgttcacacaaacggtgatacgtacacttttcccggcaataacatacggcgtgacatcggcttcaaatggcgtatagccgccctgatgctccatcacttcctgattattgacccacactttgccgtaatgagtgaccgcatcgaaacgcagcacgatacgctggcctgcccaacctttcggtataaagacttcgcgctgataccagacgttgcccgcataattacgaatatctgcatcggcgaactgatcgttaaaactgcctggcacagcaattgcccggctttcttgtaacgcgctttcccaccaacgctgatcaattccacagttttcgcgatccagactgaatgcccacaggccgtcgagttttttgatttcacgggttggggtttctacaggacgtaacattctagtcgaggaattcatttatagcatagaaaaaaacaaaatgaaattctactatatttttacatacatatattctaaatatgaaagtggtgattgtgactagcgtagcatcgcttctagacatctatatactatatagtaataccaatactcaagactacgaaactgatacaatctcttatcatgtgggtaatgttctcgatgtcgatagccatatgcccggtagttgcgatatacataaactgatcactaattccaaacccacccgctttttatagtaagtttttcacccataaataataaatacaataattaatttctcgtaaaagtagaaaatatattctaatttattgcacggtaaggaagtagaatcataaagaacagtgacggatccccgatccccgacctgcaggcatgcaagctcgactccggaaccaattactgataatgtagaagatcatacagacaccgtcacatacactagtgatagcattaatacagtaagtgcatcatctggagaatccacaacagacgagactccggaaccaattactgataaagaagatcatacagttacagacactgtctcatacactacagtaagtacatcatctggaattgtcactactaaatcaaccaccgatgatgcggatctttatgatacgtacaatgataatgatacagtaccaccaactactgtaggcggtagtacaacctctattagcaattataaaaccaaggactttgtagaaatatttggtattaccgcattaattatattgtcggccgtggcaattttctgtattacatattatatatataataaacgttcacgtaaatacaaaacagagaacaaagtctagatttttgacttacataaatgtctgggatagtaaaatctatcatattgagcggaccatctggtttaggaaagacagccatagccaaaagactatgggaatatatttggatttgtggtgtcccataccactagatttcctcgtcctatggaacgagaaggtgttgattaccattacgttaacagagaggccatctggaagggaatagccgccggaaactttctagaacatactgagtttttaggaaatatttacggaacttctaaaacagctgtgaatacagcggctattaataatcgtatttgtgtgatggatctaaacatcgacggtgttagaagtcttaaaaatacgtacctaatgccttactcggtgtatataagacctacctctcttaaaatggttgagaccaagcttcgtcgtagaaacactgaagctaacgatgagattcatcgtcgtgtgatgttggcaaaaactgacatggatgaggcaggtgaagccggtctattcgacactattatcattgaagatgatgtgaatttagcatatagtaagttaattcagatactacaggaccgtattagaatgtattttaacactaattagagacttaagacttaaaacttgataattaataatataactcgtttttatatgtgtctatttcaacgtctaatgtattagttaaatattaaaacttaccacgtaaaacttaaaatttaaaatgatatttcattgacagatagatcacacattatgaactttcaaggacttgtgttaactgacaattgcaaaaatcaatgggtcgttggaccattaataggaaaaggtggattcggtagtatttatactactaatgacaataattatgtagtaaaaatagagcccaaagctaacggatcattatttaccgaacaggcattttatactagagtacttaaaccatccgttatcgaagaatggaaaaaatctcacaatataaagcacgtaggtcttatcacgtgcaaggcatttggtctatacaaatccattaatgtggaatatcgattcttggtaattaatagattaggtgcagatctagatgcggtgatcagagccaataataatagactaccaaaaaggtcggtgatgttgatcggaatcgaaatcttaaataccatacaatttatgcacgagcaaggatattctcacggagatattaaagcgagtaatatagtcttagatcaaatagataagaataaattatatctagtggattacggattggtttctaaattcatgtctaatggcgaacatgttccatttataagaaatccaaataaaatggataacggtactctagaatttacacctatagattcgcataaaggatacgttgtatctagacgtggagatctagaaacacttggatattgtatgattagatggttgggaggtatcttaccatggactaagatatctgaaacaaagaattgtgcattagtaagtgccacaaaacagaaatatgttaacaatactgcgactttgttaatgaccagtttgcaatatgcacctagagaattgctgcaatatattaccatggtaaactctttgacatattttgaggaacccaattacgacaagtttcggcacatattaatgcagggtgtatattattaagtgtggtgtttggtcgataaaaattaaaaaataacttaatttattattgatctcgtgtgtacaaccgaaatcatggcgatgttttacgcacacgctctcggtgggtacgacgagaatcttcatgcctttcctggaatatcatcgactgttgccaatgatgtcaggaaatattctgttgtgtcagtttataataacaagtatgacattgtaaaagacaaatatatgtggtgttacagtcaggtgaacaagagatatattggagcactgctgcctatgtttgagtgcaatgaatatctacaaattggaaatccgatccatgatcaagaaggaaatcaaatctctatcatcacatatcgccacaaaaactactatgctctaagcggaatcgggtacgagagtctagacttgtgtttggaaggagtagggattcatcatcacgtacttgaaacaggaaacgctgtatatggaaaagttcaacatgattattctactatcaaagagaaggccaaagaaatgagtgcacttagtccaggacctatcatcgattaccacgtctggataggagattgtatctgtcaagttactgctgtggacgtacatggaaaggaaattatgaaaatgagattcaaaaagggtgcggtgcttccgatcccaaatctggtaaaagttaaacttggggagaatgatacagaaaatctttcttctactatatcggcggcaccatcgaggtaaccacctctctggaagacagcgtgaatcatgtactcatgaaacgtttggaaactatacgccatatgtggtctgttgtatatgatcattttgatattgtgaatggtaaagaatgctgttatgtgcatacgcattcatctaatcaaaatcctataccgagtactgtaaaaacaaatttgtacatgaagactatgggatcatgcattcaaatggattccatggaagctctagagtatcttagcgaactgaaggaatcaggtggatggagtcccagaccagaaatgcaggaatttgaatatccagatggagtggaagacactgaatcaattgagagattggcagaggagttcttcaatagatcagaacttcaggctggtgaatcagtcaaatttggtaattctattaattgttaaacatacatctgtttcagctaagcaactaagaacacgtatacggcagcagcttccttctatactctcatcttttaccaacacaaagggtggatatttgttcattggagttgataataatacacacaaagtatttggattcacggtgggttacgactacctcagactgatagagaatgatatagaaaagcatatcaaaagacttcgtgttgtgcatttctgtgagaagaaagaggacatcaagtacgcgtgtcgattcatcaaggtatataaacctggggatgagactacctcgacatacgtgtgcgctatcaaagtggaaagatgctgttgtgctgtgtttgcagattggccagaatcatggtatatggatactaatggtatcaagaagtattctccagatgaatgggtgtcacatataaaattttaattaatgtaactatagagaacaaataataaggttgtaatatcatatagacaataactaacaattaattagtaactgttatctcttttttaactaaccaactaactatatacctattaatacatcgtaattatagttcttaacatctattaatcattaattcgcttctttaattttttataaactaacattgttaattgaaaagggataacatgttacagaatataaattatatatggatttttttaaaaaggaaatacttgactggagtatatatttatctcttcattatatagcacgcgtgttttccaatttttccacatcccatataatacaggattataatctcgttcgaacatacgagaaagtggataaaacaatagttgattttttatctaggttgccaaatttattccatattttagaatatggggaaaatattctacatatttattctatggatgatgctaatacgaatattataattttttttctagatagagtattaaatattaataagaacgggtcatttatacacaatctcgggttatcatcatccattaatataaaagaatatgtatatcaattagttaataatgatcatccagataataggataagactaatgcttgaaaatggacgtagaacaagacattttttgtcctatatatcagatacagttaatatctatatatgtattttaataaatcatggattttatatagatgccgaagacagttacggttgtacattattacatagatgtatatatcactataagaaatcagaatcagaatcatacaatgaattaattaagatattgttaaataatggatcagatgtagataaaaaagatacgtacggaaacacaccttttatcctattatgtaaacacgatatcaacaacgtggaattgtttgagatatgtttagagaatgctaatatagactctgtagactttaatagatatacacctcttcattatgtctcatgtcgtaataaatatgattttgtaaagttattaatttctaaaggagcaaatgttaatgcgcgtaataaattcggaactactccattttattgtggaattatacacggtatctcgcttataaaactatatttggaatcagacacagagttagaaatagataatgaacatatagttcgtcatttaataatttttgatgctgttgaatctttagattatctattatccagaggagttattgatattaactatcgtactatatacaacgaaacatctatttacgacgctgtcagttataatgcgtataatacgttggtctatctattaaacaaaaatggtgattttgagacgattactactagtggatgtacatgtatttcggaagcagtcgcaaacaacaacaaaataataatggaagtactattgtctaaacgaccatctttgaaaattatgatacagtctatgatagcaattactaaacataaacagcataatgcagatttattgaaaatgtgtataaaatatactgcgtgtatgaccgattatgatactcttatagatgtacagtcgctacagcaatataaatggtatattttaagatgtttcgatgaaatagatatcatgaagagatgttatataaaaaataaaactgtattccaattagttttttgtatcaaagacattaatactttaatgagatacggtaaacatccttctttcgtgaaatgcactagtctcgacgtatacggaagtcgtgtacgtaatatcatagcatctattagatatcgtcagagattaattagtctattatccaagaagctggatcctggagataaatggtcgtgttttcctaacgaaataaaatataaaatattggaaaactttaacgataacgaactatccacatatctaaaaatcttataaacattattaaaatataaaatctaagtaggataaaatcacactacatcattgtttccttttagtgctcgacagtgtatactatttttaacgctcataaataaaaatgaaaacgatttccgttgttacgttgttatgcgtactacctgctgttgtttattcaacatgtactgtacccactatgaataacgctaaattaacgtctaccgaaacatcgtttaatgataaccagaaagttacgtttacatgtgatcagggatatcattctttggatccaaatgctgtctgtgaaacagataaatggaaatacgaaaatccatgcaaaaaaatgtgcacagtttctgattatgtctctgaactatataataaaccgctatacgaagtgaattccaccatgacactaagttgcaacggcgaaacaaaatattttcgttgcgaagaaaaaaatggaaatacttcttggaatgatactgttacgtgtcctaatgcggaatgtcaacctcttcaattagaacacggatcgtgtcaaccagttaaagaaaaatactcatttggggaatatatgactatcaactgtgatgttggatatgaggttattggtgcttcgtacataagttgtacagctaattcttggaatgttattccatcatgtcaacaaaaatgtgatatgccgtctctatctaacggattaatttccggatctacattttctatcggtggcgttatacatcttagttgtaaaagtggttttacactaacggggtctccatcatccacatgtatcgacggtaaatggaatcccatactcccaatatgtgtacgaactaacgaaaaatttgatccagtggatgatggtcccgacgatgagacagatttgagcaaactctcgaaagacgttgtacaatatgaacaagaaatagaatcgttagaagcaacttatcatataatcatagtggcgttgacaattatgggcgtcatatttttaatctccgttatagtattagtttgttcctgtgacaaaaataatgaccaatataagttccataaattgctaccgtaaatataaatccgttaaaataattaataatttaataacaaacaagtatcaaaagattaaagacttatagctagaatcaattgagatgtcttcttcagtggatgttgatatctacgatgccgttagagcatttttactcaggcactattataacaagagatttattgtgtatggaagaagtaacgccatattacataatatatacaggctatttacaagatgcgccgttataccgttcgatgatatagtacgtactatgccaaatgaatcacgtgttaaacaatgggtgatggatacacttaatggtataatgatgaatgaacgcgatgtttctgtaagcgttggcaccggaatactattcatggaaatgtttttcgattacaataaaaatagtatcaacaatcaactaatgtatgatataattaatagcgtatctataattctagctaatgagagatatagaagcgcttttaacgacgatggtatatacatccgtagaaatatgattaacaagttgtacggatacgcatctctaactactattggcacgatcgctggaggtgtttgttattatctgttgatgcatctagttagtttgtataaataattatttcaatatactagttaaaattttaagattttaaatgtataaaaaactaataacgtttttatttgtaataggtgcattagcatcctattcgaataatgagtacactccgtttaataaactgagtgtaaaactctatatagatggagtagataatatagaaaattcatatactgatgataataatgaattggtgttaaattttaaagagtacacaatttctattattacagagtcatgcgacgtcggatttgattccatagatatagatgttataaacgactataaaattattgatatgtataccattgactcgtctactattcaacgcagaggtcacacgtgtagaatatctaccaaattatcatgccattatgataagtacccttatattcacaaatatgatggtgatgagcgacaatattctattactgcagagggaaaatgctataaaggaataaaatatgaaataagtatgatcaacgatgatactctattgagaaaacatactcttaaaattggatctacttatatatttgatcgtcatggacatagtaatacatattattcaaaatatgatttttaaaaatttaaaatatattatcacttcagtgacagtagtcaaataacaaacaacaccatgagatatattataattctcgcagttttgttcattaatagtatacatgctaaaataactagttataagtttgaatccgtcaattttgattccaaaattgaatggactggggatggtctatacaatatatcccttaaaaattatggcatcaagacgtggcaaacaatgtatacaaatgtaccagaaggaacatacgacatatccgcatttccaaagaatgatttcgtatctttctgggttaaatttgaacaaggcgattataaagtggaagagtattgtacgggactatgcgtcgaagtaaaaattggaccaccgactgtaacattgactgaatacgacgaccatatcaatttgtacatcgagcatccgtatgctactagaggtagcaaaaagattcctatttacaaacgcggtgacatgtgtgatatctacttgttgtatacggctaacttcacattcggagattctaaagaaccagtaccatatgatatcgatgactacgattgcacgtctacaggttgcagcatagactttgtcacaacagaaaaagtgtgcgtgacagcacagggagccacagaagggtttctcgaaaaaattactccatggagttcgaaagtatgtctgacacctaaaaagagtgtatatacatgcgcaattagatccaaagaagatgttcccaatttcaaggacaaaatggccagagttatcaagagaaaatttaatacacagtctcaatcttatttaactaaatttctcggtagcacatcaaatgatgttaccacttttcttagcatgcttaacttgactaaatattcataactaatttttattaatgatacaaaaacgaaataaaactgcatattatacactggttaacgcccttataggctctaaccattttcaagatgaggtccctgattatagtccttctgttcccctctatcatctactccatgtctattagacgatgtgagaagactgaagaggaaacatggggattgaaaatagggttgtgtataattgccaaagatttctatcccgaaagaactgattgcagtgttcatctcccaactgcaagtgaaggattgataactgaaggcaatggattcagggatatacgaaacaccgataaattataaaaaaagcaatgtgtccgctgtttccgttaataatactattttcgtaactggcggattattcataaataactctaatagcacgatcgtggttaacaatatggaaaaacttgacatttataaagacaaacaatggtcgattatagaaatgcctatggctagggtatatcacggcattgactcgacatttggaatgttatattttgccggaggtctatccgttaccgaacaatatggtaatttagagaaaaacaacgagatatcttgttacaatcctagaacgaataagtggtttgatatttcatatactatttataagatatccatatcatcattgtgtaaactaaataacgtcttctatgtatttagtaaggacattggatatgtggaaaagtatgatggtgcatggaagttagtacatgatcgtctccccgctataaaggcattatcaacttctccttattgattgaaaatgaaaatataaatagtttttatgtatagcagtattaccctatagttttattgcttactactaacatggatacagatgttacaaatgtagaagatatcataaatgaaatagatagagagaaagaagaaatactaaaaaatgtagaaattgaaaataataaaaacattaacaagaatcatcccaatgaatatattagagaagcactcgttattaataccagtagtaatagtgattccattgataaagaagttatagaatgtatcagtcacgatgtaggaatatagatcatatctactaatttttataatcgatacaaaacataaaaaacaactcgttattacatagcaggcatggaatccttcaagtattgttttgataacgatggcaagaaatggattatcggaaatactttatattctggtaattcaatactctataaggtcagaaaaaatttcactagttcgttctacaattacgtaatgaagatagatcacaaatcacacaagccattgttgtctgaaatacgattctatatatctgtattggatcctttgactatcgacaactggacacgggaacgtggtataaagtatttggctattccagatctgtatggaattggagaaaccgatgattatatgttcttcgttataaagaattcgggaagagtattcgccccaaaggatactgaatcagtcttcgaagcatgcgtcactatgataaacacgttagagtttatacactctcgaggatttacccatggaaaaatagaaccgaggaatatactgattagaaataaacgtctttcactaattgactattctagaactaacaaactatacaagagtggaaactcacatatagattacaacgaggacatgataacttcaggaaatatcaattatatgtgtgtagacaatcatcttggagcaacagtttcaagacgaggagatttagaaatgttgggatattgcatgatagaatggttcggtggcaaacttccatggaaaaacgaaagtagtataaaagtaataaaacaaaaaaaagaatataaaaaatttatagctactttctttgaggactgttttcctgaaggaaatgaacctctggaattagttagatatatagaattagtatacacgttagattattctcaaactcctaattatgacagactacgtaaactgtttatacaagattgaaattatattcttttttttatagagtgtggtagtgttacggatatctaatattaatattagactatctctatcgcgctacacgaccaatatcgattactatggatatcttctatgaaaggagagaatgtatttatttctccagcgtcaatctcgtcagtattgacaatactgtattatggagctaatggatccactgctgaacagctatcaaaatatgtagaaacggaggagaacacggataaggttagcgctcagaatatctcattcaaatccatgaataaagtatatgggcgatattctgccgtgtttaaagattcctttttgagaaaaattggcgataagtttcaaactgttgacttcactgattgtcgcactatagatgcaatcaacaagtgtgtagatatctttactgaggggaaaatcaatccactattggatgaaccattgtctcctagcaattagtgccgtatactttaaagcaaaatggttgacgccattcgaaaaggaatttaccagtgattatcccttttacgtatctccgacggaaatggtagacgtaagtatgatgtctatgtacggcaaggcatttaatcacgcatctgtaaaagaatcattcggcaacttttcaatcatagaactgccatatgttggagatactagtatgatggtcattcttccagacaagattgatggattagaatccatagaacaaaatctaacagatacaaattttaagaaatggtgtgactttatggatgctatgtttatagatgttcacattcccaagtttaaggtaacaggctcgtataatctggtggatactctagtaaagtcaggactgacagaggtgttcggttcaactggagattatagcaatatgtgtaatttagatgtgagtgtcgacgctatgatccacaaaacgtatatagatgtcaatgaagagtatacagaagcagctgcagcaacttctgtactagtggcagactgtgcatcaacaattacaaatgagttctgtgcagatcatccgttcatctatgtgattaggcatgttgatggaaaaattcttttcgttggtagatattgctctccgacaactaattgttaaccattttttttaaaaaaaatagaaaaaacatgtggtattagtgcaggtcgttgttcttccaattgcaattggtaagatgacggccaactttagtacccacgtcttttcaccacagcactgtggatgtgacagactgaccagtattgatgacgtcaaacaatgtttgactgaatatatttattggtcgtcctatgcataccgcaacaggcaatgcgctggacaattgtattccacactcctctcttttagagatgatgcggaattagtgttcatcgacattcgcgagctggtaaaaaatatgccgtgggatgatgtcaaagattgtacagaaatcatccgttgttatataccggatgagcaaaaaaccatcagagagatttcggccatcatcggactttgtgcatatgctgctacttactggggaggtgaagaccatcccactagtaacagtctgaacgcattgtttgtgatgcttgagatgctaaattacgtggattataacatcatattccggcgtatgaattgatgagttgtacatcttgacattttctttcttctcttctccctttcttctcttctcccttcctccctcttctccctttcccagaaacaaacttttttacccactataaaataaaatgagtatactacctattatatttcttcctatatttttttattcttcattcgttcagacttttaacgcgtctgaatgtatcgacaaagggcaatattttgcatcattcatggagttagaaaacgagccagtaatcttaccatgtcctcaaataaatacgctatcatccggatataatatattagatattttatgggaaaaacgaggagcggataatgatagaattataccgatagataatggtagcaatatgctaattctgaacccgacacaatcagactctggtatttatatatgcattaccacgaacgaaacctactgtgacatgatgtcgttaaatttgacaatcgtgtctgtctcagaatcaaatatagatcttatctcgtatccacaaatagtaaatgagagatctactggcgaaatggtatgtcccaatattaatgcatttattgctagtaacgtaaacgcagatattatatggagcggacatcgacgccttagaaataagagacttaaacaacggacacctggaattattaccatagaagatgttagaaaaaatgatgctggttattatacatgtgttttagaatatatatacggtggcaaaacatataacgtaaccagaattgtaaaattagaggtacgggatagaataataccttctactatgcaattaccagatggcattgtaacttcaataggtagtaatttgactattgcatgcagagtatcgttgagacctcccacaacggacaccgacgtcttttggataagtaatggtatgtattacgaagaagatgatggggacggaaacggtagaataagtgtagcaaataaaatctatatgaccgataagagacgtgttattacatcccggttaaacattaatcctgtcaaggaagaagatgctacaacgtttacgtgtatggcgtttactattcctagcatcagcaaaacagttactgttagtataacgtgaatgtatgttgttacatttccatgtcaattgagtttataagaatttttatacattatcttccaacaaacaattgacgaacgtattgctatgattaactcccacgatactatgcatattattaatcattaacttgcagactatacctagtgctattttgacatactcgtgttcttgtgtaattgcggtatctatattattaaagtacgtaaatctagctatagttttattatttaattttagataatataccgtctccttatttttaaaaattgccacatcctttattaaatcatgaatgggaatttctatgtcatcgttagtatattgtgaacaacaagagcagatatctataggaaagggtggaatgcgatacattgatctatgtagttttaaaacacacgcgaactttgaagaatttatataaatcattccatcgatacatccttctatgttgacatgtatatatccaggaattcttttattaatgtcaggaaatgtataaactaaaacattgcccgaaagcggtgcctctatctgcgttatatccgttcttaacttacaaaatgtaaccaatacctttgcatgacttgttttgttcggcaacgttagtttaaacttgacgaatggattaattacaatagcatgatccgcgcatctattaagtttttttactttaacgcccttgtatgtttttacagagactttatctaaatttctagtgcttgtatgtgttataaatataacgggatatagaaccgaatcacctaccttagatacccaattacattttatcagatccagataataaacaaattttgtcgccctaactaattctatattgttatatattttacaattggttatgatatcatgtaataacttggagtctaacgcgcatcgtcgtacgtttatacaattgtgatttagtgtagtatatctacacatgtatttttccgcactatagtattctggactagtgataaaactatcgttatatctgtcttcaatgaactcatcgagatattgctctctgtcatattcatacacctgcataaactttctagacatcttacaatccgtgttattttaggatcatatttacatatttacgggtatatcaaagatgttagattagttaatgggaatcgtctataataatgaatattaaacaattatatgaggacttttaccacaaagcatcataaaaatgagtcgtcgtctgatttatgttttaaatatcaaccgcaaatcaactcataaaatacaagagaatgaaatatatacatattttagtcattgcaatatagaccatacttctacagaacttgattttgtagttaaaaactatgatctaaacagacgacaacctgtaactgggtatactgcactacactgctatttgtataataattactttacaaacgatgtactgaagatattattaaatcatgacgtaaatgtaacgatgaaaaccagtagcggacgtatgcctgtttatatattgcttactagatgttgtaatatttcacatgatgtagtgatagatatgatagacaaagataaaaaccacttattacatagagactattccaacctattactagagtatataaaatctcgttacatgttattgaaggaagaggatatcgatgagaacatagtatccactttattagataagggaatcgatcctaactttaaacaagacggatatacagcgttacattattattatttgtgtctcgcacacgtttataaactaggtgagtgtagaaaaccgataacgataaaaaaggccaagcgaattatttctttgtttatacaacatggagctaatctaaacgcgttagataattgtggtaatacaccattccatttgtatcttagtattgaaatgtgtaataatattcatatgactaaaatgctgttgacttttaatccgaatttcaaaatatgtaataatcatggattaacgcctatactatgttatataacttccgactacatacaacacgatattcttgttatgttaatacatcactatgaaacaaatgttggagaaatgccgatagatgagcgtcgtatgatcgtattcgagtttatcaaaacatattctacacgtccggcagattcgataacttatttgatgaataggtttaaaaatataaatatttatacccgctatgaaggaaagacattattacacgtagcatgtgaatataataatacacaagtaatagattatcttatacgtatcaacggagatataaatgcgttaaccgacaataacaaacacgctacacaactcattatagataacaaagaaaattccccatataccattaattgtttactgtatatacttagatatattgtagataagaatgtgataagatcgttggtggatcaacttccatctctacctatcttcgatataaaatcatttgagaaattcatatcctactgtatacttttagatgacacattttacgataggcacgttaagaatcgcgattctaaaacgtatcgatacgcattttcaaaatacatgtcgtttgataaatacgatggtataataactaaatgtcacgacgaaacaatgttactcaaactgtccactgttctagacactacactatatgcagttttaagatgtcataattcgagaaagttaagaagatacctcaacgagttaaaaaaatataataacgataagtcctttaaaatatattctaatattatgaatgagagataccttaatgtatattataaagatatgtacgtgtcaaaggtatatgataaactatttcctgttttcacagataaaaattgtctactaacattactaccttcagaaattatatacgaaatattatacatgctgacaattaacgatctttataatatatcgtatccacctaccaaagtatagttgtatttttctcatgcgatgtgtgtaaaaaaactgatattatataaatattttagtgccgtataataaagatgacgatgaaaatgatggtacatatatatttcgtatcattattgttattgctattccacagttacgccatagacatcgaaaatgaaatcacagaattcttcaataaaatgagagatactctaccagctaaagactctaaatggttgaatccagcatgtatgttcggaggcacaatgaatgatatagccgctctaggagagccattcagcgcaaagtgtcctcctattgaagacagtcttttatcgcacagatataaagactatgtggttaaatgggagaggctagaaaagaatagacggcgacaggtttctaataaacgtgttaaacatggtgatttatggatagccaactatacatctaaattcagtaaccgtaggtatttgtgcaccgtaactacaaagaatggtgactgtgttcagggtatagttagatctcatattaaaaaacctccttcatgcattccaaaaacatatgaactaggtactcatgataagtatggcatagacttatactgtggaattctttacgcaaaacattataataatataacttggtataaagataataaggaaattaatatcgacgacattaagtattcacaaacgggaaaggaattaattattcataatccagagttagaagatagcggaagatacgactgttacgttcattacgacgacgttagaatcaagaatgatatcgtagtatcaagatgtaaaatacttacggttataccgtcacaagaccacaggtttaaactaatactagatccgaaaatcaacgtaacgataggagaacctgccaatataacatgcactgctgtgtcaacgtcattattgatcgacgatgtactgattgaatgggaaaatccatccggatggcttataggattcgattttgatgtatactctgttttaactagtagaggcggtatcaccgaggcgaccttgtactttgaaaatgttactgaagaatatataggtaatacatataaatgtcgtggacacaactattattttgaaaaaacccttacaactacagtagtattggagtaaatatacaatgcatttttatatacattactgaattattattactgaattattattactgaattattattaattatatcgtatttgtgctatagaatggatgaagatacgcgactatctaggtatttgtatctcaccgatagagaacatataaatgtagactctattaaacagttgtgtaaaatatcagatcctaatgcatgttatagatgtggatgtacggctttacatgagtacttttataattatagatcagtcaacggaaaatacaagtatagatacaacggttactatcaatattattcatctagcgattatgaaaattataatgaatattattatgatagaactggtatgaacagtgagagtgataatatatcaatcaaaacagaatatgaattctatgatgaaacacaagatcaaagtacacaactagtaggttacgacattaaactcaaaaccaatgaggatgattttatggctatgatagatcagtgggtgtccatgattatatagatgaatcaattaataaagtagtatatggaagagagtctcacgtaagatggcgggatatatggcaagaacataatgatggcgtatacagtataggaaaggagtgcatagataatatatacgaagacaaccataccgtagacgaattctacaagatagacagcgtatcagatgtagatgacgcggaacacatatctccgataactaaaaaaccatagaatcagttgatgataatacctacatttctaatcttccgtataccatcaaatacaaaatattcgagcaacaataagtattttttatacctttaaaactgataaataaattttttctagtgatattttggcaagatgagaatcctatttctcatcgctttcatgtatgggtgtgttcactcatatgttaacgcggttgaaaccaaatgtccaaatctagacattgtaacatcttctggagaatttcattgttcaggatgtgtggaacatatgcctgagtttagctatatgtattggttggcaaaggatatgaaatcggacgaggataccaagtttatagaacatctgggtgatggcatcaaagaagatgaaaccgttcgtaccacagatagtggaatcgtcactctacgtaaagtccttcatgtgactgatactaataaatttgataattataggttcacttgtgtcctcgctacgctagatggcatttataaaaagaatgtttgctgaagtagttgtgtgctactatttttatttatgatataatctaatggaattaatttgaattgatatttatccaatactaaagattatattagaatcaaattaatcttttatacgagaaaaaataacgacatacgtcgtcaacaaattaaactttttatttattagttaactagcttatagaacttgctcattgttatgtttctaaaacgggtacggcatataggacaattatccgacgcaccggtttctcttcgtgttctatgccatatattgatgcatgttatgcaaaatatatgagtacacgaatccaataaaccaaagtatctatcgttttgagtaaacaacttcatagcaaattccacattctttttctttacttactctatacacgtcctcgtatttatttagtattttgatgatatccaactcagaaatggttgttgtattattgggtgtatttggagtataggtattattagctatgtaccaatttaccaaccctcttaatattgattgataatcacatcggttatccaattaataactaaattgtagtgtatatatagaccatatatgtttctatttttttgacagttacgtatagtttcagtaagttttgattgttgtattcctgtatctctagataagttagtcatatagtcccttccggcgatacgttttttccaagcccgaaattgattagccaaatgtgtatttatttttgtgatattgatataatatttcggataatgcatactgttagtcttatatcatttggttcatctatgtattgtaatattgttacatgatctatagatgatgtattgattttggcaggatcgaattccatatccgcgactaaacagtgaaaaaaatgtaaatactttttaaattttaaattagtaaaacttttttttattttttatgattccaaaaatactgaatacaaagtcctaaattataaatatggagatcatactaccacaacttattattatgtatacaaggccggtgtaatagatagatatatataattctattacaccggcagacaattaccgaccggtatttgtcgttaccaacataccgtataatatgtaatatacaattccataacccattgacagttgttatacatcaaaattgcaattcttttgattacgatgttataagaatgtagttaattgatgtatgatgttaatgtgtcctctttcctcttataacatcgtaatcaaaaacttttttataatatatacctaataatgtgtcttaatagttctcgtgattcgtcaaacaatcattcttataaaatataataaagcaacgtaaaaacacataaaaataagcgtaactaataagacaatggatatttacgacgataaaggtctacagactattaaactgtttaataatgaatttgattgtataaggaatgacatcagagaattatttaaacatgtaactgattccgatagtatacaacttccgatggaagacaattctgatattatagaaaatatcagaaaaatactatatagacgattaaaaaatgtagaatgtgttgacatcgataacacaataacttttatgaaatacgatccaaatgatgataataagcgtacgtgttctaattgggtacccttaactaataactatatggaatattgtctagtaatatatttggaaacaccgatatgtggaggcaaaataaaattataccaccctacaggaaatataaagtcggataaggatattatgtttgcaaagactctagactttaaatcaacgaaagtgttaactggacgtaaaacaattgccgttctagacatatccgtttcatataatagatcaatgactactattcactacaacgacgacgttgatatagatatacatactgataaaaatggaaaagagttatgttattgttatataacaatagatgatcattacttggttgatgtggaaactataggagttatagtcaatagatctggaaaatgtctgttagtaaataaccatctaggtataggtatcgttaaagataaacgtataagcgatagttttggagatgtatgtatggatacaatatttgacttttctgaagcacgagagttattttcattaactaatgatgataacaggaatatagcatgggacactgataaactagacgatgatacagatatatggactcccgtcacagaagatgattacaaatttctttctagactagtattgtatgcaaaatctcaatcggatactgtatttgactattatgttcttactggtgatacggaaccacccactgtattcattttcaaggtaactagattttactttaatatgccgaaataaaaaatttttgtataatatctagaggtagaggtattgtttagataaatacaaataacatagatacatcgcatacttagcatttttataaatatacataagacatacactttatacatttttgtaaaaatactcataaaaaaatttataaaaattatggcacaaccatatcttgtataggtagtttagttcgtcgagtgaacctataaacagataatagacaacacataataatgcctactaatacaagcataataccgggagatgggatatatgacgttgtagtgtttgggttttctgaacgttgatagtctactaatactacatgctgacatctaatgcctgtataaccatgagagcatctacaatacataccgtcaatatctctagcgtggatacagtcaccgtgtaaacaatatccatctccctctggaccgcataatctgatagctggaatatctgttgtagcgtttgtaatttctggcaatgtcgtttcgatagcgttaccactatcggcgaatgatctgattatcatagcagcgaacaacaacatcagataatttatcaacatttttgatggattctgtgtttatgctgtttctcagtgtgtgtttatgacaagattgggaattttatattattaattcagtaatataaactaataatatattgttaattgtgtaaataatataaaaataacaatacaatattgaatgtgttgctgttaaaaatgtatgtgttaatataatagaataaaataaatgagtatgatcattttagataacgattgattttatcattaccgcttcattcttatattctttgcttacggaacctatatttagaaacatctactaacaattttttatgcttgcattattaatggtatgtaatatgattgattgtgtacgcaataccaatttgttaagtatgaatacggggtacaaacataaattgaaatttaacattatttatttatgatatatatcgttatcgttaggtctataccatggatatctttaaagaactaatcttaaaacaccctgatgaaaatgttttgatttctccagtttccattttatctactttatctattctaaatcatggagcagctggttctacagctgaacaactatcaaaatatatagagaatatgaatgagaatacacccgatgacaataatgatgacatggaggtagatattccgtattgtgcgacactagctaccgcaaataaaatatacggtagcgatagtatcgagttccacgcctccttcctacaaaaaataaaagacgattttcaaactgtaaactttaataatgctaaccaaacaaaggaactaatcaacgaatgggttaagacaatgacaaatggtaaaattaattccttattgactagtccgctatccattaatactcgtatgacagttgttagcgccgtccattttaaagcaatgtggaaatatccattttctaaacatcttacatatacagacaagttttatatttctaagaatatagttaccagcgttgatatgatggtgggtaccgagaataacttgcaatatgtacatattaatgaattattcggaggattctctattatcgatattccatacgagggaaactctagtatggtaattatactaccggacgacatagaaggtatatataacatagaaaaaaatataacagatgaaaaatttaaaaaatggtgtggtatgttatctactaaaagtatagacttgtatatgccaaagtttaaagtggaaatgacagaaccgtataatctggtaccgattttagaaaatttaggacttactaatatattcggatattatgcagattttagcaagatgtgtaatgaaactatcactgtagaaaaatttctacatacgacgtttatagatgttaatgaggagtatacagaagcatcggccgttacaggagtatttacgattaacttttcgatggtatatcgtacgaaggtctacataaaccatccattcatgtacatgattaaagacaccacaggacgtatactttttatagggaaatactgctatccgcaataaatataaacaaatagacttttataaagagtcttcaacgataagtatatcgacatactacttatgctgcgaaagattctgaacgagaacgactatctcaccctcttggatcatatccgcactgctaaatactaaatctccactacactttttatcatcttatgaggaatgattgccttcgtgaaataggaataattagcaccagaatagctatggattattgtggtagagagtgcactattctatgtcgtctactggatgaagatgtgacgtacaaaaaaataaaactagaaattgaaacgtgtcacaacttatcaaaacatatagatagacgaggaaacaatgcgctacattgttacgtctccaataaatgcgatacagacattaagattgttctctcgcggagtcgagagactttgtagaaacaacgaaggattaactccgctaggagtatacagtaagcatagatacgtaaaatctcagattgtgcatctactgatatccagctattcaaattcctctaacgaactcaagtcgaatataaatgatttcgatctgtattcggataatatcgacttacgtctgctaaaatacctaattgtggataaacggatacgtccgtccaagaatacgaattatgcaatcaatggtctcggattggtggatatatacgtaacgacgcctaatccgagaccagaagtattgctatggcttcttaaatcagaatgttacagcaccggttacgtatttcgtacctgtatgtacgacagtgatatgtgtaagaactctcttcattactatatatcgtctcatagagaatctcaatctctatccaaggatgtaattaaatgtttgatcgataacaatgtttccatccatggcagagacgaaggaggatctttacccatccaatactactggtctttctcaaccatagatatagagattgttaaattattattaataaaggatgtggacacgtgtagagtatacgacgtcagccctatattagaggcgtattatctaaacaagcgatttagagtaaccccatataatgtagacatggaaatcgttaatcttcttattgagagacgtcatactcttgtcgacgtaatgcgtagtattacttcgtacgattccagagaatataaccactacatcatcgataacattctaaagagatttagacaacaggatgaatccatcgtacaagccatactgataaactacttacattacggcgatatggtcgttcgatgcatgttagataacggacaacaactatcctctacacgactactttgttaataataatctcgtcgatgtaaacgtcgtaaggtttatcgtggaaaatatggacacgcggctgtaaatcacgtatcgaacaatggccgtctatgtatgtacggtctgatattatcgagatttaataattgcgggtatcactgttatgaaaccatactgatagatgtatttgatatactaagcaagtacatggatgatatagatatgatcgataactctactatattacgcggtcgatgtcaataatatacaatttgcaaagcggttattggaatatggagcgagtatcacgctcgataatcaatacggccatccagaaaagcagttacagaagagaaaacaaaacgaaatcgttgttctacaagatgtctctccctacgacgattactacgtaaaaaagatactagcctactgcctattaagggacgagtcattcgcggaactacatagtaaattctgtttaaacgaggactataaaagtgtatttatgaaaaatatatcattcgataagatagattccatcatcgtgacataagtcgcctcaaagagattcgaatctccgacaccgacctgtatacggtatcacagctatcttaaagccatacattcagacagtcacatttcatttcccatgtacgacgatctcatagaacagtgccatctatcgatggagcgtaaaagtaaactcgtcgacaaagcactcaataaattagagtctaccatcggtcaatctagactatcgtatttgcctccggaaattatgcgcaatatcatctaaacagtatgttgtacggaaagaaccattacaaatattatccatgatagaaagaaaatatctatatgattggagaagtaggaaacaggaacaagacaacgattactacattattaaatcatgaagtccgtattatactcgtatatattgtttctctcatgtataataataaacggaagagatatagcaccgcatgcaccatccgatggaaagtgtaaagacaacgaatacaaacgccataatttgtgtccgggaacatacgcttccagattatgcgatagcaagactaacacacgatgtacgccgtgtggttcgggtaccttcacatctcgcaataatcatttacccgcttgtctaagttgtaacggaagacgcgatcgtgtaacacgactcacaatagaatctgtgaatgctctcccggatattattgtcttctcaaaggatcatccggatgcaaggcatgtgtttcccaaacaaaatgtggaataggatacggagtatccggagacgtcatctgttctccgtgtggtctcggaacatattctcacaccgtctcttccgcagataaatgcgaacccgtacccagaaatacgtttaactatatcgatgtggaaattaacctgtatccagttaacgacacgtcgtgtactcggacgaccactaccggtctcagcgaatccatctcaacgtcggaactaactattactatgaatcataaagactgtaatcccgtatttcgtgatggatacttctccgttcttaataaggtagcgacttcaggtttctttacaggagaaaggtgtgcactctgaatttcgagattaaatgcaataacaaagattcttcctccaaacagttaacgaaagcaaagaatgatactatcatgccgcattcggagacagtaactctagtgggcgacatctatatactatatagtaataccaatactcaagactacgaaactgatacaatctcttatcatgtgggtaatgttctcgatgtcgatagccatatgcccggtagttgcgatatacataaactgatcactaattccaaacccacccactttttatagtaagtttttcacccataaataataaatacaataattaatttctcgtaaaagtagaaaatatattctaatttattgcacggtaaggaagtagaatcataaagaacagtactcaatcaatagcaattatgaaacaatatatcgtcctggcatgcatgtgcctggcggcagctgctatgcctgccagtcttcagcaatcatcctcatcctcctcctcgtgtacggaagaagaaaacaaacatcatatgggaatcgatgttattatcaaagtcacaaagcaagaccaaacaccgaccaatgataagatttgccaatccgtaacggaaattacagagtccgagtcagatccagatcccgaggtggaatcagaagatgattccacatcagtcgaggatgtagatcctcctaccacttattactccatcatcggtggaggtctgagaatgaactttggattcaccaaatgtcctcagattaaatccatctcagaatccgctgatggaaacacagtgaatgctagattgtccagcgtgtccccaggacaaggtaaggactctcccgcgatcactcatgaagaagctcttgctatgatcaaagactgtgaagtgtctatcgacatcagatgtagcgaagaagagaaagacagcgacatcaagacccatccagtactcgggtctaacatctctcataagaaagtgagttacgaagatatcatcggttcaacgatcgtcgatacaaaatgcgtcaagaatctagagtttagcgttcgtatcggagacatgtgcaaggaatcatctgaacttgaggtcaaggatggattcaagtatgtcgacggatcggcatctgaaggtgcaaccgatgatacttcactcatcgattcaacaaaactcaaagcgtgtgtctgaatcgataactctattcatctgaaattggatgagtagggttaatcgaacgattcaggcacaccacgaattaaaaaagtgtaccggacactatattccggtttgcaaaacaaaaatgttcttaactacattcacaaaaagttacctctcgcgacttcttctttttctgtctcaatagtgtgatacgattatgacactattcctattcctattcctatttcctttcagagtatcacaaaaatattaaacctctttctgatggtctcataaaaaaagttttacaaaaatatttttattctctttctctctttgatggtctcataaaaaaagttttacaaaaatatttttattctctttctctctttgatggtctcataaaaaaagttttacaaaaatatttttattctctttctctctttgatggtctcataaaaaaagttttacaaaaatatttttattctctttctctctttgatggtctcataaaaaaagttttacaaaaatatttttattctctttctctctttgatggtctcataaaaaaagttttacaaaaatatttttattctctttctctctttgatggtctcataaaaaaagttttacaaaaatatttttattctctttctctctttgatggtctcataaaaaaagttttacaaaaatatttttattctctttctctctttgatggtctcataaaaaaagttttacaaaaatatttttattctctttctctctttgatggtctcataaaaaaagttttacaaaaatatttttattctctttctctctttgatggtctcataaaaaaagttttacaaaaatatttttattctctttctctctttgatggtctcataaaaaaagttttacaaaaatatttttattctctttctctctttgatggtctcataaaaaagttttacaaaaatatttttattctctttctctctttgatggtctcataaaaaagttttacaaaaatatttttattctctttctctctttgatggtctcataaaaaaagttttacaaaaatatttttattctctttctctctttgatggtctcataa

SEQ ID NO: 3 - protein, 264 aa, Mus Musculus
  Apolipoprotein A1 Accession No. Q00623
MKAVVLAVALVFLTGSQAWHVWQQDEPQSQWDKVKDFANVYVDAVKDSGRDYVSQFESSSLGQQLNLNLLENWDTLGSTVSQLQERLGPLTRDFWDNLEKETDWVRQEMNKDLEEVKQKVQPYLDEFQKKWKEDVELYRQKVAPLGAELQESARQKLQELQGRLSPVAEEFRDRMRTHVDSLRTQLAPHSEQMRESLAQRLAELKSNPTLNEYHTRAKTHLKTLGEKARPALEDLRHSLMPMLETLKTKAQSVIDKASETLTAQ

SEQ ID NO: 4 - protein, 230 aa, Rattus norvegicus
  C-Reactive Protein Accession No. P48199
MEKLLWCLLITISFSQAFGHEDMSKQAFVFPGVSATAYVSLEAESKKPLEAFTVCLYAHADVSRSFSIFSYATKTSFNEILLFWTRGQGFSIAVGGPEILFSASEIPEVPTHICATWESATGIVELWLDGKPRVRKSLQKGYIVGTNASIILGQEQDSYGGGFDANQSLVGDIGDVNMWDFVLSPEQINAVYVGRVFSPNVLNWRALKYETHGDVFIKPQLWPLTDCCES

SEQ ID NO: 5 - protein, 225 aa, Mus musculus
  C-Reactive Protein Accession No. P14847
MEKLLWCLLIMISFSRTFGHEDMFKKAFVFPKESDTSYVSLEAESKKPLNTFTVCLHFYTALSTVRSFSVFSYATKKNSNDILIFWNKDKQYTFGVGGAEVRFMVSEIPEAPTHICASWESATGIVEFWIDGKAKVRKSLHKGYTVGPDASIILGQEQDSYGGDFDAKQSLVGDIGDVNMWDFVLSPEQINTVYVGGTLSPNVLNWRALNYKAQGDVFIKPQLWS

SEQ ID NO: 6 - protein, 289 aa, Mus musculus
  CD40 Accession No. P27512
MVSLPRLCALWGCLLTAVHLGQCVTCSDKQYLHDGQCCDLCQPGSRLTSHCTALEKTQCHPCDSGEFSAQWNREIRCHQHRHCEPNQGLRVKKEGTAESDTVCTCKEGQHCTSKDCEACAQHTPCIPGFGVMEMATETTDTVCHPCPVGFFSNQSSLFEKCYPWTSCEDKNLEVLQKGTSQTNVICGLKSRMRALLVIPVVMGILITIFGVFLYIKKVVKKPKDNEILPPAARRQDPQEMEDYPGHNTAAPVQETLHGCQPVTQEDGKESRISVQERQVTDSIALRPLV

SEQ ID NO: 7 - protein, 260 aa, Mus musculus
  CD40 Ligand Accession No. P27548
MIETYSQPSPRSVATGLPASMKIFMYLLTVFLITQMIGSVLFAVYLHRRLDKVEEEVNLHEDFVFIKKLKRCNKGEGSLSLLNCEEMRRQFEDLVKDITLNKEEKKENSFEMQRGDEDPQIAAHVVSEANSNAASVLQWAKKGYYTMKSNLVMLENGKQLTVKREGLYYVYTQVTFCSNREPSSQRPFIVGLWLKPSSGSERILLKAANTHSSSQLCEQQSVHLGGVFELQAGASVFVNVTEASQVIHRVGFSSFGLLKL

SEQ ID NO: 8 - protein, 202 aa, Mus musculus
  Endothelin-1 Accession No. P22387
MDYFPVIFSLLFVTFQGAPETAVLGAELSTGAENGVQSPPPSTPWRPRRSKRCSCSSLMDKECVYFCHLDIIWVNTPERVVPYGLGGSSRSKRSLKDLLPNKATDQAVRCQCAHQKDKKCWNFCQAGKELRAQSTMQKSLKDSKKGKPCSKLGKKCIYQQLVEGRKLRRLEAISNSIKASFRVAKLKAELYRDQKLTHNRAH

SEQ ID NO: 9 - protein, 202 aa, Rattus norvegicus
  Endothelin-1 Accession No. P22388
MDYFPVIFSLLFVAFQGAPETAVLGAELSPRAEKEVQSPPPSTSWRPRRSKRCSCSSLMDKECVYFCHLDIIWVNTPERVVPYGLGSPSRSKRSLKDLLPTKTTDQGNRCQCAHQKDKKCWNFCQADKELRAQSTMQKGVKDFKKGKPCPKLGKKCIYQQLVEGRKLRRLEAISNSIKTSFRVAKLKAELYRDQKLIHNRAH

SEQ ID NO: 10 - protein, 97 aa, Mus musculus
  Eotaxin Accession No. P48298
MQSSTALLFLLLTVTSFTSQVLAHPGSIPTSCCFIMTSKKIPNTLLKSYKRITNNRCTLKAIVFKTRLGKEICADPKKKWVQDATKHLDQKLQTPKP

SEQ ID NO: 11 - protein, 1133 aa, Rattus norvegicus
  Epidermal Growth Factor Accession No. P07522
MLFSLTFLSVFLKITVLSVTAQQTRNCQSGPLERSGTTTYAAAGPPRFLIFLQGNSIFRINTDGTNHQQLVVDAGVSVVMDFHYKEERLYWVDLERQLLQRVFFNGSGQETVCKVDKNVSGLAINWIDGEILRTDRWKGVITVTDMNGNNSRVLLSSLKRPANILVDPTERLIFWSSVVTGNLHRADLGGMDVKTLLEAPERISVLILDILDKRLFWAQDGREGSHGYIHSCDYNGGSIHHIRHQARHDLLTMAIFGDKILYSALKEKAIWIADKHTGKNVVRVNLDPASVPPRELRVVHLHAQPGTENRAQASDSERCKQRRGQCLYSLSERDPNSDSSACAEGYTLSRDRKYCEDVNECALQNHGCTLGCENIPGSYYCTCPTGFVLLPDGKRCHELVACPGNRSECSHDCILTSDGPLCICPAGSVLGKDGKTCTGCSFSDNGGCSQICLPLSLASWECDCFPGYDLQLDRKSCAASMGPQPFLLFANSQDIRHMHFDGTDYKTLLSRQMGMVFALDYDPVESKIYFAQTALKWIERANLDGSQRERRITEGVDTPEGLAVDWIGRRIYWTDSGKSVIEGSDLSGKHHQIIIKESISRPRGIAVHPKARRLFWTDTGMSPRIESSSLQGSDRTLIASSNLLEPSGIAIDYLTDTLYWCDTKLSVIEMADLDGSKRRRLTQNDVGHPFSLAVFEDHVWFSDWAIPSVIRVNKRTGQNRVRLRGSMLKPSSLVVVHPLAKPGADPCLHRNGGCEHICQESLGTAQCLCREGFVKAPDGKMCLTRKDDQILAGDNADLSKEVASLDNSPKAYVPDDDRTESSTLVAEIMVSGLNYEDDCGPGGCGSHAHCISEGEAAVCQCLKGFAGDGNLCSDIDECELGSSDCPPTSSRCINTEGGYVCQCSEGYEGDGIYCLDVDECQQGSHGCSENATCTNTEGGYNCTCAGCPSAPGLPCPDSTSPSLLGKDGCHWVRNSNTGCPPSYDGYCLNGGVCMYVESVDRYVCNCVIGYIGERCQHRDLRWWKLRHADYGQRHDITVVSVCVVALALLLLLGMWGTYYYRTRKQLSESSKKPSEESSSNVSSNGPDSSGAGVSSGPQPWFVVLEEHQQPKNGRLPAAGTNGAVVEAGLSSSL

SEQ ID NO: 12 - protein, 446 aa, Mus musculus
  Factor VII Accession No. P70375
MVPQAHGLLLLCFLLQLQGPLGTAVFITQEEAHGVLHRQRRANSLLEELWPGSLERECNEEQCSFEEAREIFKSPERTKQFWIVYSDGDQCASNPCQNGGTCQDHLKSYVCFCLLDFEGRNCEKSKNEQLICANENGDCDQYCRDHVGTKRTCSCHEDYTLQPDEVSCKPKVEYPCGRIPVVEKRNSSSRQGRIVGGNVCPKGECPWQAVLKINGLLLCGAVLLDARWIVTAAHCFDNIRYWGNITVVMGEHDFSEKDGDEQVRRVTQVIMPDKYIRGKINHDIALLRLHRPVTFTDYVVPLCLPEKSFSENTLARIRFSRVSGWGQLLDRGATALELMSIEVPRLMTQDCLEHAKHSSNTPKITENMFCAGYMDGTKDACKGDSGGPHATHYHGTWYLTGVVSWGEGCAAIGHIGVYTRVSQYIDWLVRHMDSKLQVGVFRLPLL

SEQ ID NO: 13 - protein, 481 aa, Mus musculus
  Fibrinogen Beta chain Accession No. Q8K0E8
MRHLWLLLLLCVFSVQTQAADDDYDEPTDSLDARGHRPVDRRKEEPPSLRPAPPPISGGGYRARPAKATANQKKVERRPPDAGGCLHADTDMGVLCPTGCTLQQTLLNQERPIKSSIAELNNNIQSVSDTSSVTFQYLTLLKDMWKKKQAQVKENENVINEYSSILEDQRLYIDETVNDNIPLNLRVLRSILEDLRSKIQKLESDISAQMEYCRTPCTVSCNIPVVSGKECEEIIRKGGETSEMYLIQPDTSIKPYRVYCDMKTENGGWTVIQNRQDGSVDFGRKWDPYKKGFGNIATNEDAKKYCGLPGEYWLGNDKISQLTRMGPTELLIEMEDWKGDKVKAHYGGFTVQNEASKYQVSVNKYKGTAGNALMDGASQLVGENRTMTIHNGMFFSTYDRDNDGWVTTDPRKQCSKEDGGGWWYNRCHAANPNGRYYWGGLYSWDMSKHGTDDGVVWMNWKGSWYSMRRMSMKIRPFFPQQ

SEQ ID NO: 14 - protein, 436 aa, Mus musculus
  Fibrinogen Gamma chain Accession No. Q8VCM7
MSWSLQPPSFLLCCLLLLFSPTGLAYVATRDNCCILDERFGSFCPTTCGIADFLSSYQTDVDNDLRTLEDILFRAENRTTEAKELIKAIQVYYNPDQPPKPGMIDSATQKSKKMVEEIVKYEALLLTHETSIRYLQEIYNSNNQKITNLKQKVAQLEAQCQEPCKDSVQIHDTTGKDCQEIANKGAKESGLYFIRPLKAKQQFLVYCEIDGSGNGWTVLQKRIDGSLDFKKNWIQYKEGFGHLSPTGTTEFWLGNEKIHLISMQSTIPYALRIQLKDWNGRTSTADYAMFRVGPESDKYRLTYAYFIGGDAGDAFDGYDFGDDPSDKFFTSHNGMQFSTWDNDNDKFEGNCAEQDGSGWWMNKCHAGHLNGVYHQGGTYSKSSTTNGFDDGIIWATWKSRWYSMKETTMKIIPFNRLSIGEGQQHHMGGSKQAGDV

SEQ ID NO: 15 - protein, 154 aa, Mus musculus
  Fibrogrowth Growth Factor-basic (FGF-basic) Accession No. P15655
MAASGITSLPALPEDGGAAFPPGHFKDPKRLYCKNGGFFLRIHPDGRVDGVREKSDPHVKLQLQAEERGVVSIKGVCANRYLAMKEDGRLLASKCVTEECFFFERLESNNYNTYRSRKYSSWYVALKRTGQYKLGSKTGPGQKAILFLPMSAKS

SEQ ID NO: 16 - protein, 208 aa, Mus musculus
  Fibrogrowth Growth Factor-9 (FGF-9) Accession No. P54130
MAPLGEVGSYFGVQDAVPFGNVPVLPVDSPVLLNDHLGQSEAGGLPRGPAVTDLDHLKGILRRRQLYCRTGFHLEIFPNGTIQGTRKDHSRFGILEFISIAVGLVSIRGVDSGLYLGMNEKGELYGSEKLTQECVFREQFEENWYNTYSSNLYKHVDTGRRYYVALNKDGTPREGTRTKRHQKFTHFLPRPVDPDKVPELYKDILSQS

SEQ ID NO: 17 - protein, 132 aa, Mus musculus
  Granulocyte Chemotactic Protein-2 (GCP-2) Accession No. NP_033167
MSLQLRSSARIPSGSISPFMRMAPLAFLLLFTLPQHLAEAAPSSVIAATELRCVCLTVTPKINPKLIANLEVIPAGPQCPTVEVIAKLKNQKEVCLDPEAPVIKKIIQKILGSDKKKAKRNALAVERTASVQ

SEQ ID NO: 18 - protein, 141 aa, Mus musculus
  GM-CSF Accession No. P01587
MWLQNLLFLGIVVYSLSAPTRSPITVTRPWKHVEAIKEALNLLDDMPVTLNEEVEVVSNEFSFKKLTCVQTRLKIFEQGLRGNFTKLKGALNMTASYYQTYCPPTPETDCETQVTTYADFIDSLKTFLTDIPFECKKPGQK

SEQ ID NO: 19 - protein, 223 aa, Mus musculus
  GST-alpha Accession No. P13745
MAGKPVLHYFNARGRMECIRWLLAAAGVEFEEKFIQSPEDLEKLKKDGNLMFDQVPMVEIDGMKLAQTRAILNYIATKYDLYGKDMKERALIDMYSEGILDLTEMIGQLVLCPPDQREAKTALAKDRTKNRYLPAFEKVLKSHGQDYLVGNRLTRVDIHLLEVLLYVEEFDASLLTPFPLLKAFKSRISSLPNVKKFLQPGSQRKPPMDAKQIQEARKAFKIQ

SEQ ID NO: 20 - protein, 222 aa, Mus musculus
  GST-alpha Accession No. P10648
MAGKPVLHYFNARGRMECIRWLLAAAGVEFEEKFIQSPEDLEKLKKDGNLMFDQVPMVEIDGMKLVQTRAILNYIATKYDLYGKDMKERALIDMYTEGILDLTEMIGQLVLCPPDQREAKTALAKDRTKNRYLPAFEKVLKSHGQDYLVGNRLTRVDVHLLELLLYVEELDASLLTPFPLLKAFKSRISSLPNVKKFLQPGSQRKPPLDAKQIEEARKVFKF

SEQ ID NO: 21 - protein, 221 aa, Mus musculus
  GST-alpha Accession No. P30115
MAGKPVLHYFDGRGRMEPIRWLLAAAGVEFEEKFLKTRDDLARLRSDGSLMFQQVPMVEIDGMKLVQTKAILNYIASKYNLYGKDMKERAIIDMYTEGVADLEIMILYYPHMPPEEKEASLAKIKEQTRNRYFPAFEKVLKSHGQDYLVGNRLSRADIALVELLYHVEELDPGVVDNFPLLKALRSRVSNLPTVKKFLQPGSQRKPFDDAKCVESAKKIFS

SEQ ID NO: 22 - protein, 222 aa, Mus musculus
  GST-alpha Accession No. P24472
MAAKPKLYYFNGRGRMESIRWLLAAAGVEFEEEFLETREQYEKMQKDGHLLFGQVPLVEIDGMMLTQTRAILSYLAAKYNLYGKDLKERVRIDMYADGTQDLMMMIAVAPFKTPKEKEESYDLILSRAKTRYFPVFEKILKDHGEAFLVGNQLSWADIQLLEAILMVEELSAPVLSDFPLLQAFKTRISNIPTIKKFLQPGSQRKPPPDGPYVEVVRTVLKF

SEQ ID NO: 23 - protein, 347 aa, Mus musculus
  Haptoglobin Accession No. Q61646
MRALGAVVTLLLWGQLFAVELGNDAMDFEDDSCPKPPEIANGYVEHLVRYRCRQFYRLRAEGDGVYTLNDEKQWVNTVAGEKLPECEAVCGKPKHPVDQVQRIIGGSMDAKGSFPWQAKMISRHGLTTGATLISDQWLLTTAKNLFLNHSETASAKDITPTLTLYVGKNQLVEIEKVVLHPNHSVVDIGLIKLKQRVLVTERVMPICLPSKDYIAPGRVGYVSGWGRNANFRFTDRLKYVMLPVADQDKCVVHYENSTVPEKKNLTSPVGVQPILNEHTFCAGLTKYQEDTCYGDAGSAFAIHDMEEDTWYAAGILSFDKSCAVAEYGVYVRATDLKDWVQETMAKN

SEQ ID NO: 24 - protein, 98 aa, Mus musculus
  Inducible Protein-10 Accession No. P17515
MNPSAAVIFCLILLGLSGTQGIPLARTVRCNCIHIDDGPVRMRAIGKLEIIPASLSCPRVEIIATMKKNDEQRCLNPESKTIKNLMKAFSQKRSKRAP

SEQ ID NO: 25 - protein, 155 aa, Mus musculus
  Interferon-gamma Accession No. P01580
MNATHCILALQLFLMAVSGCYCHGTVIESLESLNNYFNSSGIDVEEKSLFLDIWRNWQKDGDMKILQSQIISFYLRLFEVLKDNQAISNNISVIESHLITTFFSNSKAKKDAFMSIAKFEVNNPQVQRQAFNELIRVVHQLLPESSLRKRKRSRC

SEQ ID NO: 26 - protein, 270 aa, Mus musculus
  Interleukin-1 alpha Accession No. P01582
MAKVPDLFEDLKNCYSENEDYSSAIDHLSLNQKSFYDASYGSLHETCTDQFVSLRTSETSKMSNFTFKESRVTVSATSSNGKILKKRRLSFSETFTEDDLQSITHDLEETIQPRSAPYTYQSDLRYKLMKLVRQKFVMNDSLNQTIYQDVDKHYLSTTWLNDLQQEVKFDMYAYSSGGDDSKYPVTLKISDSQLFVSAQGEDQPVLLKELPETPKLITGSETDLIFFWKSINSKNYFTSAAYPELFIATKEQSRVHLARGLPSMTDFQIS

SEQ ID NO: 27 - protein, 269 aa, Mus musculus
  Interleukin-1 beta Accession No. P10749
MATVPELNCEMPPFDSDENDLFFEVDGPQKMKGCFQTFDLGCPDESIQLQISQQHINKSFRQAVSLIVAVEKLWQLPVSFPWTFQDEDMSTFFSFIFEEEPILCDSWDDDDNLLVCDVPIRQLHYRLRDEQQKSLVLSDPYELKALHLNGQNINQQVIFSMSFVQGEPSNDKIPVALGLKGKNLYLSCVMKDGTPTLQLESVDPKQYPKKKMEKRFVFNKIEVKSKVEFESAEFPNWYISTSQAEHKPVFLGNNSGQDIIDFTMESVSS

SEQ ID NO: 28 - protein, 169 aa, Mus musculus
  Interleukin-2 Accession No. P04351
MYSMQLASCVTLTLVLLVNSAPTSSSTSSSTAEAQQQQQQQQQQQQHLEQLLMDLQELLSRMENYRNLKLPRMLTFKFYLPKQATELKDLQCLEDELGPLRHVLDLTQSKSFQLEDAENFISNIRVTVVKLKGSDNTFECQFDDESATVVDFLRRWIAFCQSIISTSPQ

SEQ ID NO: 29 - protein, 166 aa, Mus musculus
  Interleukin-3 Accession No. P01586
MVLASSTTSIHTMLLLLLMLFHLGLQASISGRDTHRLTRTLNCSSIVKEIIGKLPEPELKTDDEGPSLRNKSFRRVNLSKFVESQGEVDPEDRYVIKSNLQKLNCCLPTSANDSALPGVFIRDLDDFRKKLRFYMVHLNDLETVLTSRPPQPASGSVSPNRGTVEC

SEQ ID NO: 30 - protein, 140 aa, Mus musculus
  Interleukin-4 Accession No. P07750
MGLNPQLVVILLFFLECTRSHIHGCDKNHLREIIGILNEVTGEGTPCTEMDVPNVLTATKNTTESELVCRASKVLRIFYLKHGKTPCLKKNSSVLMELQRLFRAFRCLDSSISCTMNESKSTSLKDFLESLKSIMQMDYS

SEQ ID NO: 31 - protein, 133 aa, Mus musculus
  Interleukin-5 Accession No. P04401
MRRMLLHLSVLTLSCVWATAMEIPMSTVVKETLTQLSAHRALLTSNETMRLPVPTHKNHQLCIGEIFQGLDILKNQTVRGGTVEMLFQNLSLIKKYIDRQKEKCGEERRRTRQFLDYLQEFLGVMSTEWAMEG

SEQ ID NO: 32 - protein, 211 aa, Mus musculus
  Interleukin-6 Accession No. P08505
MKFLSARDFHPVAFLGLMLVTTTAFPTSQVRRGDFTEDTTPNRPVYTTSQVGGLITHVLWEIVEMRKELCNGNSDCMNNDDALAENNLKLPEIQRNDGCYQTGYNQEICLLKISSGLLEYHSYLEYMKNNLKDNKKDKARVLQRDTETLIHIFNQEVKDLHKIVLPTPISNALLTDKLESQKEWLRTKTIQFILKSLEEFLKVTLRSTRQT

SEQ ID NO: 33 - protein, 154 aa, Mus musculus
  Interleukin-7 Accession No. P10168
MFHVSFRYIFGIPPLILVLLPVTSSECHIKDKEGKAYESVLMISIDELDKMTGTDSNCPNNEPNFFRKHVCDDTKEAAFLNRAARKLKQFLKMNISEEFNVHLLTVSQGTQTLVNCTSKEEKNVKEQKKNDACFLKRLLREIKTCWNKILKGSI

SEQ ID NO: 34 - protein, 178 aa, Mus musculus
  Interleukin-10 Accession No. P18893
MPGSALLCCLLLLTGMRISRGQYSREDNNCTHFPVGQSHMLLELRTAFSQVKTFFQTKDQLDNILLTDSLMQDFKGYLGCQALSEMIQFYLVEVMPQAEKHGPEIKEHLNSLGEKLKTLRMRLRRCHRFLKCENKSKAVEQVKSDFNKLEDQGVYKAMNEFDIFINCIEAYMMIKMKS

SEQ ID NO: 35 - protein, 199 aa, Mus musculus
  Interleukin-11 Accession No. P47873
MNCVCRLVLVVLSLWPDRVVAPGPPAGSPRVSSDPRADLDSAVLLTRSLLADTRQLAAQMRDKFPADGDHSLDSLPTLAMSAGTLGSLQLPGVLTRLRVDLMSYLRHVQWLRRAGGPSLKTLEPELGALQARLERLLRRLQLLMSRLALPQAAPDQPVIPLGPPASAWGSIRAAHAILGGLHLTLDWAVRGLLLLKTRL

SEQ ID NO: 36 - protein, 215 aa, Mus musculus
  Interleukin-12p70 alpha chain Accession No. P43431
MCQSRYLLFLATLALLNHLSLARVIPVSGPARCLSQSRNLLKTTDDMVKTAREKLKHYSCTAEDIDHEDITRDQTSTLKTCLPLELHKNESCLATRETSSTTRGSCLPPQKTSLMMTLCLGSIYEDLKMYQTEFQAINAALQNHNHQQIILDKGMLVAIDELMQSLNHNGETLRQKPPVGEADPYRVKMKLCILLHAFSTRVVTINRVMGYLSSA

SEQ ID NO: 37 - protein, 335 aa, Mus musculus
  Interleukin-12p70 beta chain Accession No. P43432
MCPQKLTISWFAIVLLVSPLMAMWELEKDVYVVEVDWTPDAPGETVNLTCDTPEEDDITWTSDQRHGVIGSGKTLTITVKEFLDAGQYTCHKGGETLSHSHLLLHKKENGIWSTEILKNFKNKTFLKCEAPNYSGRFTCSWLVQRNMDLKFNIKSSSSSPDSRAVTCGMASLSAEKVTLDQRDYEKYSVSCQEDVTCPTAEETLPIELALEARQQNKYENYSTSFFIRDIIKPDPPKNLQMKPLKNSQVEVSWEYPDSWSTPHSYFSLKFFVRIQRKKEKMKETEEGCNQKGAFLVEKTSTEVQCKGGNVCVQAQDRYYNSSCSKWACVPCRVRS

SEQ ID NO: 38 - protein, 158 aa, Mus musculus
  Interleukin-17 Accession No. Q62386
MSPGRASSVSLMLLLLLSLAATVKAAAIIPQSSACPNTEAKDFLQNVKVNLKVFNSLGAKVSSRRPSDYLNRSTSPWTLHRNEDPDRYPSVIWEAQCRHQRCVNAEGKLDHHMNSVLIQQEILVLKREPESCPFTFRVEKMLVGVGCTCVASIVRQAA

SEQ ID NO: 39 - protein, 96 aa, Mus musculus
  KC/GRO alpha Accession No. P12850
MIPATRSLLCAALLLLATSRLATGAPIANELRCQCLQTMAGIHLKNIQSLKVLPSGPHCTQTEVIATLKNGREACLDPEAPLVQKIVQKMLKGVPK

SEQ ID NO: 40 - protein, 203 aa, Mus musculus [sequence omitted]

SEQ ID NO: 41 - protein, 114 aa, Mus musculus
  Lymphotactin Accession No. P47993
MRLLLLTFLGVCCLTPWVVEGVGTEVLEESSCVNLQTQRLPVQKIKTYIIWEGAMRAVIFVTKRGLKICADPEAKWVKAAIKTVDGRASTRKNMAETVPTGAQRSTSTAITLTG

SEQ ID NO: 42 - protein, 552 aa, Mus musculus
  M-CSF Accession No. P07141
MTARGAAGRCPSSTWLGSRLLLVCLLMSRSIAKEVSEHCSHMIGNGHLKVLQQLIDSQMETSCQIAFEFVDQEQLDDPVCYLKKAFFLVQDIIDETMRFKDNTPNANATERLQELSNNLNSCFTKDYEEQNKACVRTFHETPLQLLEKIKNFFNETKNLLEKDWNIFTKNCNNSFAKCSSRDVVTKPDCNCLYPKATPSSDPASASPHQPPAPSMAPLAGLAWDDSQRTEGSSLLPSELPLRIEDPGSAKQRPPRSTCQTLESTEQPNHGDRLTEDSQPHPSAGGPVPGVEDILESSLGTNWVLEEASGEASEGFLTQEAKFSPSTPVGGSIQAETDRPRALSASPFPKSTEDQKPVDITDRPLTEVNPMRPIGQTQNNTPEKTDGTSTLREDHQEPGSPHIATPNPQRVSNSATPVAQLLLPKSHSWGIVLPLGELEGKRSTRDRRSPAELEGGSASEGAARPVARFNSIPLTDTGHVEQHEGSSDPQIPESVFHLLVPGIILVLLTVGGLLFYKWKWRSHRDPQTLDSSVGRPEDSSLTQDEDRQVELPV

SEQ ID NO: 43 - protein, 92 aa, Mus musculus
  MDC Accession No. Q546S6
MATLRVPLLVALVLLAVAIQTSDAGPYGANVEDSICCQDYIRHPLPSRLVKEFFWTSKSCRKPGVVLITVKNRDICADPRQVWVKKLLHKLS

SEQ ID NO: 44 - protein, 92 aa, Mus musculus
  MIP-1 alpha Accession No. P10855
MKVSTTALAVLLCTMTLCNQVFSAPYGADTPTACCFSYSRKIPRQFIVDYFETSSLCSQPGVIFLTKRNRQICADSKETWVQEYITDLELNA

SEQ ID NO: 45 - protein, 92 aa, Mus musculus
  MIP-1 beta Accession No. P14097
MKLCVSALSLLLLVAAFCAPGFSAPMGSDPPTSCCFSYTSRQLHRSFVMDYYETSSLCSKPAVVFLTKRGRQICANPSEPWVTEYMSDLELN

SEQ ID NO: 46 - protein, 122 aa, Mus musculus
  MIP-1 gamma Accession No. P51670
MKPFHTALSFLILTTALGIWAQITHATETKEVQSSLKAQQGLEIEMFHMGFQDSSDCCLSYNSRIQCSRFIGYFPTSGGCTRPGIIFISKRGFQVCANPSDRRVQRCIERLEQNSQPRTYKQ

SEQ ID NO: 47 - protein, 100 aa, Mus musculus
  MIP-2 Accession No. P10889
MAPPTCRLLSAALVLLLLLATNHQATGAVVASELRCQCLKTLPRVDFKNIQSLSVTPPGPHCAQTEVIATLKGGQKVCLDPEAPLVQKIIQKILNKGKAN

SEQ ID NO: 48 - protein, 108 aa, Mus musculus
  MIP-3 beta Accession No. O70460
MAPRVTPLLAFSLLVLWTFPAPTLGGANDAEDCCLSVTQRPIPGNIVKAFRYLLNEDGCRVPAVVFTTLRGYQLCAPPDQPWVDRIIRRLKKSSAKNKGNSTRRSPVS

SEQ ID NO: 49 - protein, 730 aa, Mus musculus
  MMP-9 Accession No. P41245
MSPWQPLLLALLAFGCSSAAPYQRQPTFVVFPKDLKTSNLTDTQLAEAYLYRYGYTRAAQMMGEKQSLRPALLMLQKQLSLPQTGELDSQTLKAIRTPRCGVPDVGRFQTFKGLKWDHHNITYWIQNYSEDLPRDMIDDAFARAFAVWGEVAPLTFTRVYGPEADIVIQFGVAEHGDGYPFDGKDGLLAHAFPPGAGVQGDAHFDDDELWSLGKGVVIPTYYGNSNGAPCHFPFTFEGRSYSACTTDGRNDGTPWCSTTADYDKDGKFGFCPSERLYTEHGNGEGKPCVFPFIFEGRSYSACTTKGRSDGYRWCATTANYDQDKLYGFCPTRVDATVVGGNSAGELCVFPFVFLGKQYSSCTSDGRRDGRLWCATTSNFDTDKKWGFCPDQGYSLFLVAAHEFGHALGLDHSSVPEALMYPLYSYLEGFPLNKDDIDGIQYLYGRGSKPDPRPPATTTTEPQPTAPPTMCPTIPPTAYPTVGPTVGPTGAPSPGPTSSPSPGPTGAPSPGPTAAPTAGSSEASTESLSPADNPCNVDVFDAIAEIQGALHFFKDGWYWKFLNHRGSPLQGPFLTARTWPALPATLDSAFEDPQTKRVFFFSGRQMWVYTGKTVLGPRSLDKLGLGPEVTHVSGLLPRRPGKALLFSKGRVWRFDLKSQKVDPQSVIRVDKEFSGVPWNSHDIFQYQDKAYFCHGKFFWRVSFQNEVNKVDPEVNQVDDVGYVTYDLLQCP

SEQ ID NO: 50 - protein, 148 aa, Mus musculus
  MCP-1 Accession No. P10148
MQVPVMLLGLLFTVAGWSIHVLAQPDAVNAPLTCCYSFTSKMIPMSRLESYKRITSSRCPKEAVVFVTKLKREVCADPKKEWVQTYIKNLDRNQMRSEPTTLFKTASALRSSAPLNVKLTRKSEANASTTFSTTTSSTSVGVTSVTVN

SEQ ID NO: 51 - protein, 97 aa, Mus musculus
  MCP-3 Accession No. Q03366
MRISATLLCLLLIAAAFSIQVWAQPDGPNASTCCYVKKQKIPKRNLKSYRRITSSRCPWEAVIFKTKKGMEVCAEAHQKWVEEAIAYLDMKTPTPKP

SEQ ID NO: 52 - protein, 104 aa, Mus musculus
  MCP-5 Accession No. Q62401
MKISTLLCLLLIATTISPQVLAGPDAVSTPVTCCYNVVKQKIHVRKLKSYRRITSSQCPREAVIFRTILDKEICADPKEKWVKNSINHLDKTSQTFILEPSCLG

SEQ ID NO: 53 - protein, 718 aa, Mus musculus
  Myeloperoxidase (MPO) Accession No. P11247
MKLLLALAGLLAPLAMLQTSNGATPALLGEVENSVVLSCMEEAKQLVDRAYKERRESIKRTLQSGSASPTELLFYFKQPVAGTRTAVRAADYLHVALDLLKRKLQPLWPRPFNVTDVLTPAQLNLLSVSSGCAYQDVGVTCPPNDKYRTITGHCNNRRSPTLGASNRAFVRWLPAEYEDGVSMPFGWTPGVNRNGFKVPLARQVSNAIVRFPNDQLTKDQERALMFMQWGQFLDHDITLTPEPATRFSFFTGLNCETSCLQQPPCFPLKIPPNDPRIKNQKDCIPFFRSCPACTRNNITIRNQINALTSFVDASGVYGSEDPLARKLRNLTNQLGLLAVNTRFQDNGRALMPFDSLHDDPCLLTNRSARIPCFLAGDMRSSEMPELTSMHTLFVREHNRLATQLKRLNPRWNGEKLYQEARKIVGAMVQIITYRDYLPLVLGPAAMKKYLPQYRSYNDSVDPRIANVFTNAFRYGHTLIQPFMFRLNNQYRPTAANPRVPLSKVFFASWRVVLEGGIDPILRGLMATPAKLNRQNQIVVDEIRERLFEQVMRIGLDLPALNMQRSRDHGLPGYNAWRRFCGLPQPSTVGELGTVLKNLELARKLMAQYGTPNNIDIWMGGVSEPLEPNGRVGQLLACLIGTQFRKLRDGDRFWWENPGVFSKQQRQALASISLPRLICDNTGITTVSKNNIFMSNTYPRDFVSCNTLPKLNLTSWKET

SEQ ID NO: 54 - protein, 154 aa, Mus musculus
  Myoglobin Accession No. P04247
MGLSDGEWQLVLNVWGKVEADLAGHGQEVLIGLFKTHPETLDKFDKFKNLKSEEDMKGSEDLKKHGCTVLTALGTILKKKGQHAAEIQPLAQSHATKHKIPVKYLEFISEIIIEVLKKRHSGDFGADAQGAMSKALELFRNDIAAKYKELGFQG

SEQ ID NO: 55 - protein, 263 aa, Mus musculus
  Oncostatin M Accession No. P53347
MQTRLLRTLLSLTLSLLILSMALANRGCSNSSSQLLSQLQNQANLTGNTESLLEPYIRLQNLNTPDLRAACTQHSVAFPSEDTLRQLSKPHFLSTVYTTLDRVLYQLDALRQKFLKTPAFPKLDSARHNILGIRNNVFCMARLLNHSLEIPEPTQTDSGASRSTTTPDVFNTKIGSCGFLWGYHRFMGSVGRVFREWDDGSTRSRRQSPLRARRKGTRRIRVRHKGTRRIRVRRKGTRRIWVRRKGSRKIRPSRSTQSPTTRA

SEQ ID NO: 56 - protein, 317 aa, Rattus norvegicus
  Osteopontin Accession No. P08721
MRLAVVCFCLFGLASCLPVKVAEFGSSEEKAHYSKHSDAVATWLKPDPSQKQNLLAPQNSVSSEETDDFKQETLPSNSNESHDHMDDDDDDDDDGDHAESEDSVNSDESDESHHSDESDESFTASTQADVLTPIAPTVDVPDGRGDSLAYGLRSKSRSFPVSDEQYPDATDEDLTSRMKSQESDEAIKVIPVAQRLSVPSDQDSNGKTSHESSQLDEPSVETHSLEQSKEYKQRASHESTEQSDAIDSAEKPDAIDSAERSDAIDSQASSKASLEHQSHEFHSHEDKLVLDPKSKEDDRYLKFRISHELESSSSEVN

SEQ ID NO: 57 - protein, 91 aa, Mus musculus
  RANTES Accession No. P30882
MKISAAALTIILTAAALCTPAPASPYGSDTTPCCFAYLSLALPRAHVKEYFYTSSKCSNLAVVFVTRRNRQVCANPEKKWVQEYINYLEMS

SEQ ID NO: 58 - protein, 224 aa, Mus musculus
  Serum Amyloid P Accession No. P12246
MDKLLLWMFVFTSLLSEAFCQTDLKRKVFVFPRESETDHVKLIPHLEKPLQNFTLCFRTYSDLSRSQSLFSYSVKGRDNELLIYKEKVGEYSLYIGQSKVTVRGMEEYLSPVHLCTTWESSSGIVEFWVNGKPWVKKSLQREYTVKAPPSIVLGQEQDNYGGGFQRSQSFVGEFSDLYMWDYVLTPQDILFVYRDSPVNPNILNWQALNYEINGYVVIRPRVWD

SEQ ID NO: 59 - protein, 413 aa, Mus musculus
  SGOT Accession No. P05201
MAPPSVFAQVPQAPPVLVFKLTADFRDDPDPRKVNLGVGAYRTDESQPWVLPVVRKVEQKIANDNSLNHEYLPILGLAEFRSCASRLVLGDNSPAIRENRVGGVQSLGGTGALRIGADFLGRWYNGTDNKNTPIYVSSPTWENHNAVFSAAGFKDIRPYCYWDAEKRGLDLQGFLNDLENAPEFSIFVLHACAHNPTGTDPTPEQWKQIAAVMQRRFLFPFFDSAYQGFASGDLEKDAWAIRYFVSEGFELFCAQSFSKNFGLYNERVGNLTVVGKESDSVLRVLSQMEKIVRITWSNPPAQGARIVAATLSDPELFKEWKGNVKTMADRILTMRSELRARLEALKTPGTWSHITEQIGMFSFTGLNPKQVEYLVNEKHIYLLPSGRINMCGLTTKNLDYVATSIHEAVTKIQ

SEQ ID NO: 60 - protein, 273 aa, Mus musculus
  Stem Cell Factor (SCF) Accession No. P20826
MKKTQTWIITCIYLQLLLFNPLVKTKEICGNPVTDNVKDITKLVANLPNDYMITLNYVAGMDVLPSHCWLRDMVIQLSLSLTTLLDKFSNISEGLSNYSIIDKLGKIVDDLVLCMEENAPKNIKESPKRPETRSFTPEEFFSIFNRSIDAFKDFMVASDTSDCVLSSTLGPEKDSRVSVTKPFMLPPVAASSLRNDSSSSNRKAAKAPEDSGLQWTAMALPALISLVIGFAFGALYWKKKQSSLTRAVENIQINEEDNEISMLQQKEREFQEV

SEQ ID NO: 61 - protein, 356 aa, Mus musculus
  Thrombopoietin (TPO) Accession No. P40226
MELTDLLLAAMLLAVARLTLSSPVAPACDPRLLNKLLRDSHLLHSRLSQCPDVDPLSIPVLLPAVDFSLGEWKTQTEQSKAQDILGAVSLLLEGVMAARGQLEPSCLSSLLGQLSGQVRLLLGALQGLLGTQLPLQGRTTAHKDPNALFLSLQQLLRGKVRFLLLVEGPTLCVRRTLPTTAVPSSTSQLLTLNKFPNRTSGLLETNFSVTARTAGPGLLSRLQGFRVKITPGQLNQTSRSPVQISGYLNRTHGPVNGTHGLFAGTSLQTLEASDISPGAFNKGSLAFNLQGGLPPSPSLAPDGHTPFPPSPALPTTHGSPPQLHPLFPDPSTTMPNSTAPHPVTMYPHPRNLSQET

SEQ ID NO: 62 - protein, 205 aa, Mus musculus
  TIMP 1 Accession No. P12032
MMAPFASLASGILLLLSLIASSKACSCAPPHPQTAFCNSDLVIRAKFMGSPEINETTLYQRYKIKMTKMLKGFKAVGNAADIRYAYTPVMESLCGYAHKSQNRSEEFLITGRLRNGNLHISACSFLVPWRTLSPAQQRAFSKTYSAGCGVCTVFPCLSIPCKLESDTHCLWTDQVLVGSEDYQSRHFACLPRNPGLCTWRSLGAR

SEQ ID NO: 63 - protein, 294 aa, Mus musculus
  Tissue Factor Accession No. P20352
MAILVRPRLLAALAPTFLGCLLLQVIAGAGIPEKAFNLTWISTDFKTILEWQPKPTNYTYTVQISDRSRNWKNKCFSTTDTECDLTDEIVKDVTWAYEAKVLSVPRRNSVHGDGDQLVIHGEEPPFTNAPKFLPYRDTNLGQPVIQQFEQDGRKLNVVVKDSLTLVRKNGTFLTLRQVFGKDLGYIITYRKGSSTGKKTNITNTNEFSIDVEEGVSYCFFVQAMIFSRKTNQNSPGSSTVCTEQWKSFLGETLIIVGAVVLLATIFIILLSISLCKRRKNRAGQKGKNTPSRLA

SEQ ID NO: 64 - protein, 235 aa, Mus musculus
  TNF-alpha Accession No. P06804
MSTESMIRDVELAEEALPQKMGGFQNSRRCLCLSLFSFLLVAGATTLFCLLNFGVIGPQRDEKFPNGLPLISSMAQTLTLRSSSQNSSDKPVAHVVANHQVEEQLEWLSQRANALLANGMDLKDNQLVVPADGLYLVYSQVLFKGQGCPDYVLLTHTVSRFAISYQEKVNLLSAVKSPCPKDTPEGAELKPWYEPIYLGGVFQLEKGDQLSAEVNLPKYLDFAESGQVYFGVIAL

SEQ ID NO: 65 - protein, 739 aa, Mus musculus
  VCAM-1 Accession No. P29533
MPVKMVAVLGASTVLWILFAVSQAFKIEISPEYKTIAQIGDSMALTCSTTGCESPLFSWRTQIDSPLNAKVRTEGSKSVLTMEPVSFENEHSYLCTATCGSGKLERSIHVDIYSFPKDPEIQFSGPLEVGKPVTVKCLAPDIYPVYRLEIDLFKGDQLMNRQEFSSEEMTKSLETKSLEVTFTPVIEDIGKALVCRAKLHIDQIDSTLKERETVKELQVYISPRNTTISVHPSTRLQEGGAVTMTCSSEGLPAPEIFWGRKLDNEVLQLLSGNATLTLIAMRMEDSGVYVCEGVNLIGRDKAEVELVVQEKPFIVDISPGSQVAAQVGDSVVLTCAAIGCDSPSFSWRTQTDSPLNGVVRNEGAKSTLVLSSVGFEDEHSYLCAVTCLQRTLEKRTQVEVYSFPEDPVIKMSGPLVHGRPVTVNCTVPNVYPFDHLEIELLKGETTLMKKYFLEEMGIKSLETKILETTFIPTIEDTGKSLVCLARLHSGEMESEPKQRQSVQPLYVNVAPKETTIWVSPSPILEEGSPVNLTCSSDGIPAPKILWSRQLNNGELQPLSENTTLTFMSTKRDDSGIYVCEGINEAGISRKSVELIIQVSPKDIQLTVFPSKSVKEGDTVIISCTCGNVPETWIILKKKAKTGDMVLKSVDGSYTIRQAQLQDAGIYECESKTEVGSQLRSLTLDVKGKEHNKDYFSPELLALYCASSLVIPAIGMIVYFARKANMKGSYSLVEAQKSKV

SEQ ID NO: 66 - protein, 214 aa, Mus musculus
  VEGF Accession No. Q00731
MNFLLSWVHWTLALLLYLHHAKWSQAAPTTEGEQKSHEVIKFMDVYQRSYCRPIETLVDIFQEYPDEIEYIFKPSCVPLMRCAGCCNDEALECVPTSESNITMQIMRIKPHQSQHIGEMSFLQHSRCECRPKKDRTKPEKKSVRGKGKGQKRKRKKSRFKSWSVHCEPCSERRKHLFVQDPQTCKCSCKNTDSRCKARQLELNERTCRCDKPRR

SEQ ID NO: 67 - protein, 2813 aa, Mus musculus
  von Willebrand Factor Accession No. Q8CIZ8
MNPFRYEICLLVLALTWPGTLCTEKPRDRPSTARCSLFGDDFINTFDETMYSFAGGCSYLLAGDCQKRSFSILGNFQDGKRMSLSVYLGEFFDIHLFANGTVMQGDQSISMPYASQGLYLELEAGYYKLSSETFGFAARIDGNGNFQVLMSDRHFNKTCGLCGDFNIFAEDDFRTQEGTLTSDPYDFANSWALSSEEQRCKRASPPSRNCESSSGDMHQAMWEQCQLLKTASVFARCHPLVDPESFVALCEKILCTCATGPECACPVLLEYARTCAQEGMVLYGWTDHSACRPACPAGMEYKECVSPCPRTCQSLSINEVCQQQCVDGCSCPEGELLDEDRCVQSSDCPCVHAGKRYPPGTSLSQDCNTCICRNSLWICSNEECPGECLVTGQSHFKSFDNRYFTFSGICQYLLARDCEDHTFSIVIETMQCADDPDAVCTRSVSVRLSALHNSLVKLKHGGAVGIDGQDVQLPFLQGDLRIQHTVMASVRLSYAEDLQMDWDGRGRLLVKLSPVYSGKTCGLCGNYNGNKGDDFLTPAGLVEPLVVDFGNAWKLQGDCSDLRRQHSDPCSLNPRLTRFAEEACALLTSSKFEACHHAVSPLPYLQNCRYDVCSCSDSRDCLCNAVANYAAECARKGVHIGWREPGFCALGCPQGQVYLQCGNSCNLTCRSLSLPDEECSEVCLEGCYCPPGLYQDERGDCVPKAQCPCYYDGELFQPADIFSDHHTMCYCEDGFMHCTTSGTLGSLLPDTVLSSPLSHRSKRSLSCRPPMVKLVCPADNPRAQGLECAKTCQNYDLERMSLGCVSGCLCPPGMVRHENKCVALERCPCFHQGAEYAPGDTVKIGCNTCVCRERKWNCTNHVCDATRSAIGMAHYLTFDGLKYLFPGECQYVLVYDYCGSNPGTFQILVGNEGCSYPSVKCRKRVTILVDGGELELFDGEVNVKRPLRDESHFEVVESGRYVILLLGQALSVVWDHHLSISVVLKHTYQEQVCGLCGNFDGIQNNDSTTSSLQVEEDPVNFGNSWKVSSQCADTRKLSLDVSPATCHNNIMKQTMVDSACRILTSDVFQGCNRLVDPEPYLDICIYDTCSCESIGDCACFCDTIAAYAHVCAQHGQVVAWRTPTLCPQSCEEKNVRENGYECEWRYNSCAPACPVTCQHPEPLACPVQCVEGCHAHCPPGRILDELLQTCVDPQDCPVCEVAGRRLAPGKKITLSPDDPAHCQNCHCDGVNLTCEACQEPGGLVAPPTDAPVSSTTPYVEDTPEPPLHNFYCSKLLDLVFLLDGSSMLSEAEFEVLKAFVVGMMERLHISQKRIRVAVVEYHDGSRAYLELKARKRPSELRRITSQIKYTGSQVASTSEVLKYTLFQIFGKIDRPEASHITLLLTASQEPPRMARNLVRYVQGLKKKKVIVIPVGIGPHASLKQIRLIEKQAPENKAFLLSGVDELEQRRDEIVSYLCDLAPEAPAPTQPPQVAHVTVSPGIAGISSPGPKRKSMVLDVVFVLEGSDEVGEANFNKSKEFVEEVIQRMDVSPDATRISVLQYSYTVTMEYAFNGAQSKEEVLRHVREIRYQGGNRTNTGQALQYLSEHSFSPSQGDRVEAPNLVYMVTGNPASDEIKRLPGDIQVVPIGVGPHANMQELERISRPIAPIFIRDFETLPREAPDLVLQTCCSKEGLQLPTLPPLPDCSQPLDVVLLLDGSSSLPESSFDKMKSFAKAFISKANIGPHLTQVSVIQYGSINTIDVPWNVVQEKAHLQSLVDLMQQEGGPSQIGDALAFAVRYVTSQIHGARPGASKAVVIIIMDTSLDPVDTAADAARSNRVAVFPVGVGDRYDEAQLRILAGPGASSNVVKLQQVEDLSTMATLGNSFFHKLCSGFSGVCVDEDGNEKRPGDVWTLPDQCHTVTCLANGQTLLQSHRVNCDHGPRPSCANSQSPVRVEETCGCRWTCPCVCTGSSTRHIVTFDGQNFKLTGSCSYVIFQNKEQDLEVLLHNGACSPGAKQACMKSIEIKHAGVSAELHSNMEMAVDGRLVLAPYVGENMEVSIYGAIMYEVRFTHLGHILTYTPQNNEFQLQLSPKTFASKMHGLCGICDENGANDFTLRDGTVTTDWKRLVQEWTVQQPGYTCQAVPEEQCPVSDSSHCQVLLSASFAECHKVIAPATFHTICQQDSCHQERVCEVIASYAHLCRTSGVCVDWRTTDFCAMSCPPSLVYNHCERGCPRHCDGNTSFCGDHPSEGCFCPQHQVFLEGSCVPEEACTQCVGEDGVRHQFLETWVPDHQPCQICMCLSGRKINCTAQPCPTARAPTCGPCEVARLKQSTNLCCPEYECVCDLFNCNLPPVPPCEGGLQPTLTNPGECRPTFTCDCRKEECKRVSPPSCPPHRTPTLRKTQCCDEYECACSCVNSTLSCPLGYLASATTNDCGCTTTTCLPDKVCVHRGTVYPVGQFWEEGCDTCTCTDMEDTVVGLRVVQCSQRPCEDSCQPGFSYVLHEGECCGRCLPSACKVVAGSLRGDSHSSWKSVGSRWAVPENPCLVNECVRVEDAVFVQQRNISCPQLAVPTCPTGFQLNCETSECCPSCHCEPVEACLLNGTIIGPGKSVMVDLCTTCRCIVQTDAISRFKLECRKTTCEACPMGYREEKSQGECCGRCLPTACTIQLRGGRIMTLKQDETFQDGCDSHLCRVNERGEYIWEKRVTGCPPFDEHKCLAEGGKIVKIPGTCCDTCEEPDCKDITAKVQYIKVGDCKSQEEVDIHYCQGKCASKAVYSIDIEDVQEQCSCCLPSRTEPMRVPLHCTNGSVVYHEVINAMQCRCSPRNCSK

SEQ ID NO: 68 - protein, 244 aa, Homo sapiens
  Adiponectin Accession No. Q15848
MLLLGAVLLLLALPGHDQETTTQGPGVLLPLPKGACTGWMAGIPGHPGHNGAPGRDGRDGTPGEKGEKGDPGLIGPKGDIGETGVPGAEGPRGFPGIQGRKGEPGEGAYVYRSAFSVGLETYVTIPNMPIRFTKIFYNQQNHYDGSTGKFHCNIPGLYYFAYHITVYMKDVKVSLFKKDKAMLFTYDQYQENNVDQASGSVLLHLEVGDQVWLQVYGEGERNGLYADNDNDSTFTGFLLYHDTN

SEQ ID NO: 69 - protein, 418 aa, Homo sapiens
  Alpha-1 Antitrypsin Accession No. P01009
MPSSVSWGILLLAGLCCLVPVSLAEDPQGDAAQKTDTSHHDQDHPTFNKITPNLAEFAFSLYRQLAHQSNSTNIFFSPVSIATAFAMLSLGTKADTHDEILEGLNFNLTEIPEAQIHEGFQELLRTLNQPDSQLQLTTGNGLFLSEGLKLVDKFLEDVKKLYHSEAFTVNFGDTEEAKKQINDYVEKGTQGKIVDLVKELDRDTVFALVNYIFFKGKWERPFEVKDTEEEDFHVDQVTTVKVPMMKRLGMFNIQHCKKLSSWVLLMKYLGNATAIFFLPDEGKLQHLENELTHDIITKFLENEDRRSASLHLPKLSITGTYDLKSVLGQLGITKVFSNGADLSGVTEEAPLKLSKAVHKAVLTIDEKGTEAAGAMFLEAIPMSIPPEVKFNKPFVFLMIEQNTKSPLFMGKVVNPTQK

SEQ ID NO: 70 - protein, 609 aa, Homo sapiens
  Alpha-Fetoprotein Accession No. P02771
MKWVESIFLIFLLNFTESRTLHRNEYGIASILDSYQCTAEISLADLATIFFAQFVQEATYKEVSKMVKDALTAIEKPTGDEQSSGCLENQLPAFLEELCHEKEILEKYGHSDCCSQSEEGRHNCFLAHKKPTPASIPLFQVPEPVTSCEAYEEDRETFMNKFIYEIARRHPFLYAPTILLWAARYDKIIPSCCKAENAVECFQTKAATVTKELRESSLLNQHACAVMKNFGTRTFQAITVTKLSQKFTKVNFTEIQKLVLDVAHVHEHCCRGDVLDCLQDGEKIMSYICSQQDTLSNKITECCKLTTLERGQCIIHAENDEKPEGLSPNLNRFLGDRDFNQFSSGEKNIFLASFVHEYSRRHPQLAVSVILRVAKGYQELLEKCFQTENPLECQDKGEEELQKYIQESQALAKRSCGLFQKLGEYYLQNAFLVAYTKKAPQLTSSELMAITRKMAATAATCCQLSEDKLLACGEGAADIIIGHLCIRHEMTPVNPGVGQCCTSSYANRRPCFSSLVVDETYVPPAFSDDKFIFHKDLCQAQGVALQTMKQEFLINLVKQKPQITEEQLEAVIADFSGLLEKCCQGQEQEVCFAEEGQKLISKTRAALGV

SEQ ID NO: 71 - protein, 1474 aa, Homo sapiens
  Alpha-2 Macroglobulin Accession No. P01023
MGKNKLLHPSLVLLLLVLLPTDASVSGKPQYMVLVPSLLHTETTEKGCVLLSYLNETVTVSASLESVRGNRSLFTDLEAENDVLHCVAFAVPKSSSNEEVMFLTVQVKGPTQEFKKRTTVMVKNEDSLVFVQTDKSIYKPGQTVKFRVVSMDENFHPLNELIPLVYIQDPKGNRIAQWQSFQLEGGLKQFSFPLSSEPFQGSYKVVVQKKSGGRTEHPFTVEEFVLPKFEVQVTVPKIITILEEEMNVSVCGLYTYGKPVPGHVTVSICRKYSDASDCHGEDSQAFCEKFSGQLNSHGCFYQQVKTKVFQLKRKEYEMKLHTEAQIQEEGTVVELTGRQSSEITRTITKLSFVKVDSHFRQGIPFFGQVRLVDGKGVPIPNKVIFIRGNEANYYSNATTDEHGLVQFSINTTNVMGTSLTVRVNYKDRSPCYGYQWVSEEHEEAHHTAYLVFSPSKSFVHLEPMSHELPCGHTQTVQAHYILNGGTLLGLKKLSFYYLIMAKGGIVRTGTHGLLVKQEDMKGHFSISIPVKSDIAPVARLLIYAVLPTGDVIGDSAKYDVENCLANKVDLSFSPSQSLPASHAHLRVTAAPQSVCALRAVDQSVLLMKPDAELSASSVYNLLPEKDLTGFPGPLNDQDDEDCINRHNVYINGITYTPVSSTNEKDMYSFLEDMGLKAFTNSKIRKPKMCPQLQQYEMHGPEGLRVGFYESDVMGRGHARLVHVEEPHTETVRKYFPETWIWDLVVVNSAGVAEVGVTVPDTITEWKAGAFCLSEDAGLGISSTASLRAFQPFFVELTMPYSVIRGEAFTLKATVLNYLPKCIRVSVQLEASPAFLAVPVEKEQAPHCICANGRQTVSWAVTPKSLGNVNFTVSAEALESQELCGTEVPSVPEHGRKDTVIKPLLVEPEGLEKETTFNSLLCPSGGEVSEELSLKLPPNVVEESARASVSVLGDILGSAMQNTQNLLQMPYGCGEQNMVLFAPNIYVLDYLNETQQLTPEVKSKAIGYLNTGYQRQLNYKHYDGSYSTFGERYGRNQGNTWLTAFVLKTFAQARAYIFIDEAHITQALIWLSQRQKDNGCFRSSGSLLNNAIKGGVEDEVTLSAYITIALLEIPLTVTHPVVRNALFCLESAWKTAQEGDHGSHVYTKALLAYAFALAGNQDKRKEVLKSLNEEAVKKDNSVHWERPQKPKAPVGHFYEPQAPSAEVEMTSYVLLAYLTAQPAPTSEDLTSATNIVKWITKQQNAQGGFSSTQDTVVALHALSKYGAATFTRTGKAAQVTIQSSGTFSSKFQVDNNNRLLLQQVSLPELPGEYSMKVTGEGCVYLQTSLKYNILPEKEEFPFALGVQTLPQTCDEPKAHTSFQISLSVSYTGSRSASNMAIVDVKMVSGFIPLKPTVKMLERSNHVSRTEVSSNHVLIYLDKVSNQTLSLFFTVLQDVPVRDLKPAIVKVYDYYETDEFAIAEYNAPCSKDLGNA

SEQ ID NO: 72 - protein, 267 aa, Homo sapiens
  Apolipoprotein A-1 Accession No. P02647
MKAAVLTLAVLFLTGSQARHFWQQDEPPQSPWDRVKDLATVYVDVLKDSGRDYVSQFEGSALGKQLNLKLLDNWDSVTSTFSKLREQLGPVTQEFWDNLEKETEGLRQEMSKDLEEVKAKVQPYLDDFQKKWQEEMELYRQKVEPLRAELQEGARQKLHELQEKLSPLGEEMRDRARAHVDALRTHLAPYSDELRQRLAARLEALKENGGARLAEYHAKATEHLSTLSEKAKPALEDLRQGLLPVLESFKVSFLSALEEYTKKLNTQ

SEQ ID NO: 73 - protein, 99 aa, Homo sapiens
  Apolipoprotein C-III Accession No. P02656
MQPRVLLVVALLALLASARASEAEDASLLSFMQGYMKHATKTAKDALSSVQESQVAQQARGWVTDGFSSLKDYWSTVKDKFSEFWDLDPEVRPTSAVAA

SEQ ID NO: 74 - protein, 345 aa, Homo sapiens
  Apolipoprotein H Accession No. P02749
MISPVLILFSSFLCHVAIAGRTCPKPDDLPFSTVVPLKTFYEPGEEITYSCKPGYVSRGGMRKFICPLTGLWPINTLKCTPRVCPFAGILENGAVRYTTFEYPNTISFSCNTGFYLNGADSAKCTEEGKWSPELPVCAPIICPPPSIPTFATLRVYKPSAGNNSLYRDTAVFECLPQHAMFGNDTITCTTHGNWTKLPECREVKCPFPSRPDNGFVNYPAKPTLYYKDKATFGCHDGYSLDGPEEIECTKLGNWSAMPSCKASCKVPVKKATVVYQGERVKIQEKFKNGMLHGDKVSFFCKNKEKKCSYTEDAQCIDGTIEVPKCFKEHSSLAFWKTDASDVKPC

SEQ ID NO: 75 - protein, 119 aa, Homo sapiens
  Beta-2 Microglobulin Accession No. P61769
MSRSVALAVLALLSLSGLEAIQRTPKIQVYSRHPAENGKSNFLNCYVSGFHPSDIEVDLLKNGERIEKVEHSDLSFSKDWSFYLLYYTEFTPTEKDEYACRVNHVTLSQPKIVKWDRDM

SEQ ID NO: 76 - protein, 247 aa, Homo sapiens
  BDNF Accession No. P23560
MTILFLTMVISYFGCMKAAPMKEANIRGQGGLAYPGVRTHGTLESVNGPKAGSRGLTSLADTFEHVIEELLDEDQKVRPNEENNKDADLYTSRVMLSSQVPLEPPLLFLLEEYKNYLDAANMSMRVRRHSDPARRGELSVCDSISEWVTAADKKTAVDMSGGTVTVLEKVPVSKGQLKQYFYETKCNPMGYTKEGCRGIDKRHWNSQCRTTQSYVRALTMDSKKRIGWRFIRIDTSCVCTLTIKRGR

SEQ ID NO: 77 - protein, 224 aa, Homo sapiens
  C-Reactive Protein Accession No. P02741
MEKLLCFLVLTSLSHAFGQTDMSRKAFVFPKESDTSYVSLKAPLTKPLKAFTVCLHFYTELSSTRGYSIFSYATKRQDNEILIFWSKDIGYSFTVGGSEILFEVPEVTVAPVHICTSWESASGIVEFWVDGKPRVRKSLKKGYTVGAEASIILGQEQDSFGGNFEGSQSLVGDIGNVNMWDFVLSPDEINTIYLGGPFSPNVLNWRALKYEVQGEVFTKPQLWP

SEQ ID NO: 78 - protein, 141 aa, Homo sapiens
  Calcitonin Accession No. P01258
MGFQKFSPFLALSILVLLQAGSLHAAPFRSALESSPADPATLSEDEARLLLAALVQDYVQMKASELEQEQEREGSSLDSPRSKRCGNLSTCMLGTYTQDFNKFHTFPQTAIGVGAPGKKRDMSSDLERDHRPHVSMPQNAN

SEQ ID NO: 79 - protein, 866 aa, Homo sapiens
  Cancer Antigen 19-9 Accession No. Q9BXJ9
MPAVSLPPKENALFKRILRCYEHKQYRNGLKFCKQILSNPKFAEHGETLAMKGLTLNCLGKKEEAYELVRRGLRNDLKSHVCWHVYGLLQRSDKKYDEAIKCYRNALKWDKDNLQILRDLSLLQIQMRDLEGYRETRYQLLQLRPAQRASWIGYAIAYHLLEDYEMAAKILEEFRKTQQTSPDKVDYEYSELLLYQNQVLREAGLYREALEHLCTYEKQICDKLAVEETKGELLLQLCRLEDAADVYRGLQERNPENWAYYKGLEKALKPANMLERLKIYEEAWTKYPRGLVPRRLPLNFLSGEKFKECLDKFLRMNFSKGCPPVFNTLRSLYKDKEKVAIIEELVVGYETSLKSCRLFNPNDDGKEEPPTTLLWVQYYLAQHYDKIGQPSIALEYINTAIESTPTLIELFLVKAKIYKHAGNIKEAARWMDEAQALDTADRFINSKCAKYMLKANLIKEAEEMCSKFTREGTSAVENLNEMQCMWFQTECAQAYKAMNKFGEALKKCHEIERHFIEITDDQFDFHTYCMRKITLRSYVDLLKLEDVLRQHPFYFKAARIAIEIYLKLHDNPLTDENKEHEADTANMSDKELKKLRNKQRRAQKKAQIEEEKKNAEKEKQQRNQKKKKDDDDEEIGGPKEELIPEKLAKVETPLEEAIKFLTPLKNLVKNKIETHLFAFEIYFRKEKFLLMLQSVKRAFAIDSSHPWLHECMIRLFNTAVCESKDLSDTVRTVLKQEMNRLFGATNPKNFNETFLKRNSDSLPHRLSAAKMVYYLDPSSQKRAIELATTLDESLTNRNLQTCMEVLEALYDGSLGDCKEAAEIYRANCHKLFPYALAFMPPGYEEDMKITVNGDSSAEAEELANEI

SEQ ID NO: 80 - protein, 14507 aa, Homo sapiens
  Cancer Antigen 125 Accession No. NP_078966
MLKPSGLPGSSSPTRSLMTGSRSTKATPEMDSGLTGATLSPKTSTGAIVVTEHTLPFTSPDKTLASPTSSVVGRTTQSLGVMSSALPESTSRGMTHSEQRTSPSLSPQVNGTPSRNYPATSMVSGLSSPRTRTSSTEGNFTKEASTYTLTVETTSGPVTEKYTVPTETSTTEGDSTETPWDTRYIPVKITSPMKTFADSTASKENAPVSMTPAETTVTDSHTPGRTNPSFGTLYSSFLDLSPKGTPNSRGETSLELILSTTGYPFSSPEPGSAGHSRISTSAPLSSSASVLDNKISETSIFSGQSLTSPLSPGVPEARASTMPNSAIPFSMTLSNAETSAERVRSTISSLGTPSISTKQTAETILTFHAFAETMDIPSTHIAKTLASEWLGSPGTLGGTSTSALTTTSPSTTLVSEETNTHHSTSGKETEGTLNTSMTPLETSAPGEESEMTATLVPTLGFTTLDSKIRSPSQVSSSHPTRELRTTGSTSGRQSSSTAAHGSSDILRATTSSTSKASSWTSESTAQQFSEPQHTQWVETSPSMKTERPPASTSVAAPITTSVPSVVSGFTTLKTSSTKGIWLEETSADTLIGESTAGPTTHQFAVPTGISMTGGSSTRGSQGTTHLLTRATASSETSADLTLATNGVPVSVSPAVSKTAAGSSPPGGTKPSYTMVSSVIPETSSLQSSAFREGTSLGLTPLNTRHPFSSPEPDSAGHTKISTSIPLLSSASVLEDKVSATSTFSHHKATSSITTGTPEISTKTKPSSAVLSSMTLSNAATSPERVRNATSPLTHPSPSGEETAGSVLTLSTSAETTDSPNIHPTGTLTSESSESPSTLSLPSVSGVKTTFSSSTPSTHLFTSGEETEETSNPSVSQPETSVSRVRTTLASTSVPTPVFPTMDTWPTRSAQFSSSHLVSELRATSSTSVTNSTGSALPKISHLTGTATMSQTNRDTFNDSAAPQSTTWPETSPRFKTGLPSATTTVSTSATSLSATVMVSKFTSPATSSMEATSIREPSTTILTTETTNGPGSMAVASTNIPIGKGYITEGRLDTSHLPIGTTASSETSMDFTMAKESVSMSVSPSQSMDAAGSSTPGRTSQFVDTFSDDVYHLTSREITIPRDGTSSALTPQMTATHPPSPDPGSARSTWLGILSSSPSSPTPKVTMSSTFSTQRVTTSMIMDTVETSRWNMPNLPSTTSLTPSNIPTSGAIGKSTLVPLDTPSPATSLEASEGGLPTLSTYPESTNTPSIHLGAHASSESPSTIKLTMASVVKPGSYTPLTFPSIETHIHVSTARMAYSSGSSPEMTAPGETNTGSTWDPTTYITTTDPKDTSSAQVSTPHSVRTLRTTENHPKTESATPAAYSGSPKISSSPNLTSPATKAWTITDTTEHSTQLHYTKLAEKSSGFETQSAPGPVSVVIPTSPTIGSSTLELTSDVPGEPLVLAPSEQTTITLPMATWLSTSLTEEMASTDLDISSPSSPMSTFAIFPPMSTPSHELSKSEADTSAIRNTDSTTLDQHLGIRSLGRTGDLTTVPITPLTTTWTSVIEHSTQAQDTLSATMSPTHVTQSLKDQTSIPASASPSHLTEVYPELGTQGRSSSEATTFWKPSTDTLSREIETGPTNIQSTPPMDNTTTGSSSSGVTLGIAHLPIGTSSPAETSTNMALERRSSTATVSMAGTMGLLVTSAPGRSISQSLGRVSSVLSESTTEGVTDSSKGSSPRLNTQGNTALSSSLEPSYAEGSQMSTSIPLTSSPTTPDVEFIGGSTFWTKEVTTVMTSDISKSSARTESSSATLMSTALGSTENTGKEKLRTASMDLPSPTPSMEVTPWISLTLSNAPNTTDSLDLSHGVHTSSAGTLATDRSLNTGVTRASRLENGSDTSSKSLSMGNSTHTSMTYTEKSEVSSSIHPRPETSAPGAETTLTSTPGNRAISLTLPFSSIPVEEVISTGITSGPDINSAPMTHSPITPPTIVWTSTGTIEQSTQPLHAVSSEKVSVQTQSTPYVNSVAVSASPTHENSVSSGSSTSSPYSSASLESLDSTISRRNAITSWLWDLTTSLPTTTWPSTSLSEALSSGHSGVSNPSSTTTEFPLFSAASTSAAKQRNPETETHGPQNTAASTLNTDASSVTGLSETPVGASISSEVPLPMAITSRSDVSGLTSESTANPSLGTASSAGTKLTRTISLPTSESLVSFRMNKDPWTVSIPLGSHPTTNTETSIPVNSAGPPGLSTVASDVIDTPSDGAESIPTVSFSPSPDTEVTTISHFPEKTTHSFRTISSLTHELTSRVTPIPGDWMSSAMSTKPTGASPSITLGERRTITSAAPTTSPIVLTASFTETSTVSLDNETTVKTSDILDARKTNELPSDSSSSSDLINTSIASSTMDVTKTASISPTSISGMTASSSPSLFSSDRPQVPTSTTETNTATSPSVSSNTYSLDGGSNVGGTPSTLPPFTITHPVETSSALLAWSRPVRTFSTMVSTDTASGENPTSSNSVVTSVPAPGTWTSVGSTTDLPAMGFLKTSPAGEAHSLLASTIEPATAFTPHLSAAVVTGSSATSEASLLTTSESKAIHSSPQTPTTPTSGANWETSATPESLLVVTETSDTTLTSKILVTDTILFSTVSTPPSKFPSTGTLSGASFPTLLPDTPAIPLTATEPTSSLATSFDSTPLVTIASDSLGTVPETTLTMSETSNGDALVLKTVSNPDRSIPGITIQGVTESPLHPSSTSPSKIVAPRNTTYEGSITVALSTLPAGTTGSLVFSQSSENSETTALVDSSAGLERASVMPLTTGSQGMASSGGIRSGSTHSTGTKTFSSLPLTMNPGEVTAMSEITTNRLTATQSTAPKGIPVKPTSAESGLLTPVSASSSPSKAFASLTTAPPTWGIPQSTLTFEFSEVPSLDTKSASLPTPGQSLNTIPDSDASTASSSLSKSPEKNPRARMMTSTKAISASSFQSTGFTETPEGSASPSMAGHEPRVPTSGTGDPRYASESMSYPDPSKASSAMTSTSLASKLTTLFSTGQAARSGSSSSPISLSTEKETSFLSPTASTSRKTSLFLGPSMARQPNILVHLQTSALTLSPTSTLNMSQEEPPELTSSQTIAEEEGTTAETQTLTFTPSETPTSLLPVSSPTEPTARRKSSPETWASSISVPAKTSLVETTDGTLVTTIKMSSQAAQGNSTWPAPAEETGSSPAGTSPGSPEMSTTLKIMSSKEPSISPEIRSTVRNSPWKTPETTVPMETTVEPVTLQSTALGSGSTSISHLPTGTTSPTKSPTENMLATERVSLSPSPPEAWTNLYSGTPGGTRQSLATMSSVSLESPTARSITGTGQQSSPELVSKTTGMEFSMWHGSTGGTTGDTHVSLSTSSNILEDPVTSPNSVSSLTDKSKHKTETWVSTTAIPSTVLNNKIMAAEQQTSRSVDEAYSSTSSWSDQTSGSDITLGASPDVTNTLYITSTAQTTSLVSLPSGDQGITSLTNPSGGKTSSASSVTSPSIGLETLRANVSAVKSDIAPTAGHLSQTSSPAEVSILDVTTAPTPGISTTITTMGTNSISTTTPNPEVGMSTMDSTPATERRTTSTEHPSTWSSTAASDSWTVTDMTSNLKVARSPGTISTMHTTSFLASSTELDSMSTPHGRITVIGTSLVTPSSDASAVKTETSTSERTLSPSDTTASTPISTFSRVQRMSISVPDILSTSWTPSSTEAEDVPVSMVSTDHASTKTDPNTPLSTFLFDSLSTLDWDTGRSLSSATATTSAPQGATTPQELTLETMISPATSQLPFSIGHITSAVTPAAMARSSGVTFSRPDPTSKKAEQTSTQLPTTTSAHPGQVPRSAATTLDVIPHTAKTPDATFQRQGQTALTTEARATSDSWNEKEKSTPSAPWITEMMNSVSEDTIKEVTSSSSVLRTLNTLDINLESGTTSSPSWKSSPYERIAPSESTTDKEAIHPSTNTVETTGWVTSSEHASHSTIPAHSASSKLTSPVVTTSTREQAIVSMSTTTWPESTRARTEPNSFLTIELRDVSPYMDTSSTTQTSIISSPGSTAITKGPRTEITSSKRISSSFLAQSMRSSDSPSEAITRLSNFPAMTESGGMILAMQTSPPGATSLSAPTLDTSATASWTGTPLATTQRFTYSEKTTLFSKGPEDTSQPSPPSVEETSSSSSLVPIHATTSPSNILLTSQGHSPSSTPPVTSVFLSETSGLGKTTDMSRISLEPGTSLPPNLSSTAGEALSTYEASRDTKAIHHSADTAVTNMEATSSEYSPIPGHTKPSKATSPLVTSHIMGDITSSTSVFGSSETTEIETVSSVNQGLQERSTSQVASSATETSTVITHVSSGDATTHVTKTQATFSSGTSISSPHQFITSTNTFTDVSTNPSTSLIMTESSGVTITTQTGPTGAATQGPYLLDTSTMPYLTETPLAVTPDFMQSEKTTLISKGPKDVSWTSPPSVAETSYPSSLTPFLVTTIPPATSTLQGQHTSSPVSATSVLTSGLVKTTDMLNTSMEPVTNSPQNLNNPSNEILATLAATTDIETIHPSINKAVTNMGTASSAHVLHSTLPVSSEPSTATSPMVPASSMGDALASISIPGSETTDIEGEPTSSLTAGRKENSTLQEMNSTTESNIILSNVSVGAITEATKMEVPSFDATFIPTPAQSTKFPDIFSVASSRLSNSPPMTISTHMTTTQTGSSGATSKIPLALDTSTLETSAGTPSVVTEGFAHSKITTAMNNDVKDVSQTNPPFQDEASSPSSQAPVLVTTLPSSVAFTPQWHSTSSPVSMSSVLTSSLVKTAGKVDTSLETVTSSPQSMSNTLDDISVTSAATTDIETTHPSINTVVTNVGTTGSAFESHSTVSAYPEPSKVTSPNVTTSTMEDTTISRSIPKSSKTTRTETETTSSLTPKLRETSISQEITSSTETSTVPYKELTGATTEVSRTDVTSSSSTSFPGPDQSTVSLDISTETNTRLSTSPIMTESAEITITTQTGPHGATSQDTFTMDPSNTTPQAGIHSAMTHGFSQLDVTTLMSRIPQDVSWTSPPSVDKTSSPSSFLSSPAMTTPSLISSTLPEDKLSSPMTSLLTSGLVKITDILRTRLEPVTSSLPNFSSTSDKILATSKDSKDTKEIFPSINTEETNVKANNSGHESHSPALADSETPKATTQMVITTTVGDPAPSTSMPVHGSSETTNIKREPTYFLTPRLRETSTSQESSFPTDTSFLLSKVPTGTITEVSSTGVNSSSKISTPDHDKSTVPPDTFTGEIPRVFTSSIKTKSAEMTITTQASPPESASHSTLPLDTSTTLSQGGTHSTVTQGFPYSEVTTLMGMGPGNVSWMTTPPVEETSSVSSLMSSPAMTSPSPVSSTSPQSIPSSPLPVTALPTSVLVTTTDVLGTTSPESVTSSPPNLSSITHERPATYKDTAHTEAAMHHSTNTAVTNVGTSGSGHKSQSSVLADSETSKATPLMSTTSTLGDTSVSTSTPNISQTNQIQTEPTASLSPRLRESSTSEKTSSTTETNTAFSYVPTGAITQASRTEISSSRTSISDLDRPTIAPDISTGMITRLFTSPIMTKSAEMTVTTQTTTPGATSQGILPWDTSTTLFQGGTHSTVSQGFPHSEITTLRSRTPGDVSWMTTPPVEETSSGFSLMSPSMTSPSPVSSTSPESIPSSPLPVTALLTSVLVTTTNVLGTTSPEPVTSSPPNLSSPTQERLTTYKDTAHTEAMHASMHTNTAVANVGTSISGHESQSSVPADSHTSKATSPMGITFAMGDTSVSTSTPAFFETRIQTESTSSLIPGLRDTRTSEEINTVTETSTVLSEVPTTTTTEVSRTEVITSSRTTISGPDHSKMSPYISTETITRLSTFPFVTGSTEMAITNQTGPIGTISQATLTLDTSSTASWEGTHSPVTQRFPHSEETTTMSRSTKGVSWQSPPSVEETSSPSSPVPLPAITSHSSLYSAVSGSSPTSALPVTSLLTSGRRKTIDMLDTHSELVTSSLPSASSFSGEILTSEASTNTETIHFSENTAETNMGTTNSMHKLHSSVSIHSQPSGHTPPKVTGSMMEDAIVSTSTPGSPETKNVDRDSTSPLTPELKEDSTALVMNSTTESNTVFSSVSLDAATEVSRAEVTYYDPTFMPASAQSTKSPDISPEASSSHSNSPPLTISTHKTIATQTGPSGVTSLGQLTLDTSTIATSAGTPSARTQDFVDSETTSVMNNDLNDVLKTSPFSAEEANSLSSQAPLLVTTSPSPVTSTLQEHSTSSLVSVTSVPTPTLAKITDMDTNLEPVTRSPQNLRNTLATSEATTDTHTMHPSINTAVANVGTTSSPNEFYFTVSPDSDPYKATSAVVITSTSGDSIVSTSMPRSSAMKKIESETTFSLIFRLRETSTSQKIGSSSDTSTVFDKAFTAATTEVSRTELTSSSRTSIQGTEKPTMSPDTSTRSVTMLSTFAGLTKSEERTIATQTGPHRATSQGTLTWDTSITTSQAGTHSAMTHGFSQLDLSTLTSRVPEYISGTSPPSVEKTSSSSSLLSLPAITSPSPVPTTLPESRPSSPVHLTSLPTSGLVKTTDMLASVASLPPNLGSTSHKIPTTSEDIKDTEKMYPSTNIAVTNVGTTTSEKESYSSVPAYSEPPKVTSPMVTSFNIRDTIVSTSMPGSSEITRIEMESTFSLAHGLKGTSTSQDPIVSTEKSAVLHKLTTGATETSRTEVASSRRTSIPGPDHSTESPDISTEVIPSLPISLGITESSNMTIITRTGPPLGSTSQGTFTLDTPTTSSRAGTHSMATQEFPHSEMTTVMNKDPEILSWTIPPSIEKTSFSSSLMPSPAMTSPPVSSTLPKTIHTTPSPMTSLLTPSLVMTTDTLGTSPEPTTSSPPNLSSTSHEILTTDEDTTAIEAMHPSTSTAATNVETTSSGHGSQSSVLADSEKTKATAPMDTTSTMGHTTVSTSMSVSSETTKIKRESTYSLTPGLRETSISQNASFSTDTSIVLSEVPTGTTAEVSRTEVTSSGRTSIPGPSQSTVLPEISTRTMTRLFASPTMTESAEMTIPTQTGPSGSTSQDTLTLDTSTTKSQAKTHSTLTQRFPHSEMTTLMSRGPGDMSWQSSPSLENPSSLPSLLSLPATTSPPPISSTLPVTISSSPLPVTSLLTSSPVTTTDMLHTSPELVTSSPPKLSHTSDERLTTGKDTTNTEAVHPSTNTAASNVEIPSSGHESPSSALADSETSKATSPMFITSTQEDTTVAISTPHFLETSRIQKESISSLSPKLRETGSSVETSSAIETSAVLSEVSIGATTEISRTEVTSSSRTSISGSAESTMLPEISTTRKIIKFPTSPILAESSEMTIKTQTSPPGSTSESTFTLDTSTTPSLVITHSTMTQRLPHSEITTLVSRGAGDVPRPSSLPVEETSPPSSQLSLSAMISPSPVSSTLPASSHSSSASVTSLLTPGQVKTTEVLDASAEPETSSPPSLSSTSVEILATSEVTTDTEKIHPFSNTAVTKVGTSSSGHESPSSVLPDSETTKATSAMGTISIMGDTSVSTLTPALSNTRKIQSEPASSLTTRLRETSTSEETSLATEANTVLSKVSTGATTEVSRTEAISFSRTSMSGPEQSTMSQDISIGTIPRISASSVLTESAKMTITTQTGPSESTLESTLNLNTATTPSWVETHSIVIQGFPHPEMTTSMGRGPGGVSWPSPPFVKETSPPSSPLSLPAVTSPHPVSTTFLAHIPPSPLPVTSLLTSGPATTTDILGTSTEPGTSSSSSLSTTSHERLTTYKDTAHTEAVHPSTNTGGTNVATTSSGYKSQSSVLADSSPMCTTSTMGDTSVLTSTPAFLETRRIQTELASSLTPGLRESSGSEGTSSGTKMSTVLSKVPTGATTEISKEDVTSIPGPAQSTISPDISTRTVSWFSTSPVMTESAEITMNTHTSPLGATTQGTSTLDTSSTTSLTMTHSTISQGFSHSQMSTLMRRGPEDVSWMSPPLLEKTRPSFSLMSSPATTSPSPVSSTLPESISSSPLPVTSLLTSGLAKTTDMLHKSSEPVTNSPANLSSTSVEILATSEVTTDTEKTHPSSNRTVTDVGTSSSGHESTSFVLADSQTSKVTSPMVITSTMEDTSVSTSTPGFFETSRIQTEPTSSLTLGLRKTSSSEGTSLATEMSTVLSGVPTGATAEVSRTEVTSSSRTSISGFAQLTVSPETSTETITRLPTSSIMTESAEMMIKTQTDPPGSTPESTHTVDISTTPNWVETHSTVTQRFSHSEMTTLVSRSPGDMLWPSQSSVEETSSASSLLSLPATTSPSPVSSTLVEDFPSASLPVTSLLNPGLVITTDRMGISREPGTSSTSNLSSTSHERLTTLEDTVDTEDMQPSTHTAVTNVRTSISGHESQSSVLSDSETPKATSPMGTTYTMGETSVSISTSDFFETSRIQIEPTSSLTSGLRETSSSERISSATEGSTVLSEVPSGATTEVSRTEVISSRGTSMSGPDQFTISPDISTEAITRLSTSPIMTESAESAITIETGSPGATSEGTLTLDTSTTTFWSGTHSTASPGFSHSEMTTLMSRTPGDVPWPSLPSVEEASSVSSSLSSPAMTSTSFFSTLPESISSSPHPVTALLTLGPVKTTDMLRTSSEPETSSPPNLSSTSAEILATSEVTKDREKIHPSSNTPVVNVGTVIYKHLSPSSVLADLVTTKPTSPMATTSTLGNTSVSTSTPAFPETMMTQPTSSLTSGLREISTSQETSSATERSASLSGMPTGATTKVSRTEALSLGRTSTPGPAQSTISPEISTETITRISTPLTTTGSAEMTITPKTGHSGASSQGTFTLDTSSRASWPGTHSAATHRSPHSGMTTPMSRGPEDVSWPSRPSVEKTSPPSSLVSLSAVTSPSPLYSTPSESSHSSPLRVTSLFTPVMMKTTDMLDTSLEPVTTSPPSMNITSDESLATSKATMETEAIQLSENTAVTQMGTISARQEFYSSYPGLPEPSKVTSPVVTSSTIKDIVSTTIPASSEITRIEMESTSTLTPTPRETSTSQEIHSATKPSTVPYKALTSATIEDSMTQVMSSSRGPSPDQSTMSQDISTEVITRLSTSPIKTESTEMTITTQTGSPGATSRGTLTLDTSTTFMSGTHSTASQGFSHSQMTALMSRTPGDVPWLSHPSVEEASSASFSLSSPVMTSSSPVSSTLPDSIHSSSLPVTSLLTSGLVKTTELLGTSSEPETSSPPNLSSTSAEILAITEVTTDTEKLEMTNVVTSGYTHESPSSVLADSVTTKATSSMGITYPTGDTNVLTSTPAFSDTSRIQTKSKLSLTPGLMETSISEETSSATEKSTVLSSVPTGATTEVSRTEAISSSRTSIPGPAQSTMSSDTSMETITRISTPLTRKESTDMAITPKTGPSGATSQGTFTLDSSSTASWPGTHSATTQRFPQSVVTTPMSRGPEDVSWPSPLSVEKNSPPSSLVSSSSVTSPSPLYSTPSGSSHSSPVPVTSLFTSIMMKATDMLDASLEPETTSAPNMNITSDESLAASKATTETEAIHVFENTAASHVETTSATEELYSSSPGFSEPTKVISPVVTSSSIRDNMVSTTMPGSSGITRIEIESMSSLTPGLRETRTSQDITSSTETSTVLYKMPSGATPEVSRTEVMPSSRTSIPGPAQSTMSLDISDEVVTRLSTSPIMTESAEITITTQTGYSLATSQVTLPLGTSMTFLSGTHSTMSQGLSHSEMTNLMSRGPESLSWTSPRFVETTRSSSSLTSLPLTTSLSPVSSTLLDSSPSSPLPVTSLILPGLVKTTEVLDTSSEPKTSSSPNLSSTSVEIPATSEIMTDTEKIHPSSNTAVAKVRTSSSVHESHSSVLADSETTITIPSMGITSAVDDTTVFTSNPAFSETRRIPTEPTFSLTPGFRETSTSEETTSITETSAVLYGVPTSATTEVSMTEIMSSNRIHIPDSDQSTMSPDIITEVITRLSSSSMMSESTQMTITTQKSSPGATAQSTLTLATTTAPLARTHSTVPPRFLHSEMTTLMSRSPENPSWKSSLFVEKTSSSSSLLSLPVTTSPSVSSTLPQSIPSSSFSVTSLLTPGMVKTTDTSTEPGTSLSPNLSGTSVEILAASEVTTDTEKIHPSSSMAVTNVGTTSSGHELYSSVSIHSEPSKATYPVGTPSSMAETSISTSMPANFETTGFEAEPFSHLTSGFRKTNMSLDTSSVTPTNTPSSPGSTHLLQSSKTDFTSSAKTSSPDWPPASQYTEIPVDIITPFNASPSITESTGITSFPESRFTMSVTESTHHLSTDLLPSAETISTGTVMPSLSEAMTSFATTGVPRAISGSGSPFSRTESGPGDATLSTIAESLPSSTPVPFSSSTFTTTDSSTIPALHEITSSSATPYRVDTSLGTESSTTEGRLVMVSTLDTSSQPGRTSSSPILDTRMTESVELGTVTSAYQVPSLSTRLTRTDGIMEHITKIPNEAAHRGTIRPVKGPQTSTSPASPKGLHTGGTKRMETTTTALKTTTTALKTTSRATLTTSVYTPTLGTLTPLNASMQMASTIPTEMMITTPYVFPDVPETTSSLATSLGAETSTALPRTTPSVFNRESETTASLVSRSGAERSPVIQTLDVSSSEPDTTASWVIHPAETIPTVSKTTPNFFHSELDTVSSTATSHGADVSSAIPTNISPSELDALTPLVTISGTDTSTTFPTLTKSPHETETRTTWLTHPAETSSTIPRTIPNFSHHESDATPSIATSPGAETSSAIPIMTVSPGAEDLVTSQVTSSGTDRNMTIPTLTLSPGEPKTIASLVTHPEAQTSSAIPTSTISPAVSRLVTSMVTSLAAKTSTTNRALTNSPGEPATTVSLVTHPAQTSPTVPWTTSIFFHSKSDTTPSMTTSHGAESSSAVPTPTVSTEVPGVVTPLVTSSRAVISTTIPILTLSPGEPETTPSMATSHGEEASSAIPTPTVSPGVPGVVTSLVTSSRAVTSTTIPILTFSLGEPETTPSMATSHGTEAGSAVPTVLPEVPGMVTSLVASSRAVTSTTLPTLTLSPGEPETTPSMATSHGAEASSTVPTVSPEVPGVVTSLVTSSSGVNSTSIPTLILSPGELETTPSMATSHGAEASSAVPTPTVSPGVSGVVTPLVTSSRAVTSTTIPILTLSSSEPETTPSMATSHGVEASSAVLTVSPEVPGMVTSLVTSSRAVTSTTIPTLTISSDEPETTTSLVTHSEAKMISAIPTLAVSPTVQGLVTSLVTSSGSETSAFSNLTVASSQPETIDSWVAHPGTEASSVVPTLTVSTGEPFTNISLVTHPAESSSTLPRTTSRFSHSELDTMPSTVTSPEAESSSAISTTISPGIPGVLTSLVTSSGRDISATFPTVPESPHESEATASWVTHPAVTSTTVPRTTPNYSHSEPDTTPSIATSPGAEATSDFPTITVSPDVPDMVTSQVTSSGTDTSITIPTLTLSSGEPETTTSFITYSETHTSSAIPTLPVSPGASKMLTSLVISSGTDSTTTFPTLTETPYEPETTAIQLIHPAETNTMVPRTTPKFSHSKSDTTLPVAITSPGPEASSAVSTTTISPDMSDLVTSLVPSSGTDTSTTFPTLSETPYEPETTATWLTHPAETSTTVSGTIPNFSHRGSDTAPSMVTSPGVDTRSGVPTTTIPPSIPGVVTSQVTSSATDTSTAIPTLTPSPGEPETTASSATHPGTQTGFTVPIRTVPSSEPDTMASWVTHPPQTSTPVSRTTSSFSHSSPDATPVMATSPRTEASSAVLTTISPGAPEMVTSQITSSGAATSTTVPTLTHSPGMPETTALLSTHPRTETSKTFPASTVFPQVSETTASLTIRPGAETSTALPTQTTSSLFTLLVTGTSRVDLSPTASPGVSAKTAPLSTHPGTETSTMIPTSTLSLGLLETTGLLATSSSAETSTSTLTLTVSPAVSGLSSASITTDKPQTVTSWNTETSPSVTSVGPPEFSRTVTGTTMTLIPSEMPTPPKTSHGEGVSPTTILRTTMVEATNLATTGSSPTVAKTTTTFNTLAGSLFTPLTTPGMSTLASESVTSRTSYNHRSWISTTSSYNRRYWTPATSTPVTSTFSPGISTSSIPSSTAATVPFMVPFTLNFTITNLQYEEDMRHPGSRKFNATERELQGLLKPLFRNSSLEYLYSGCRLASLRPEKDSSATAVDAICTHRPDPEDLGLDRERLYWELSNLTNGIQELGPYTLDRNSLYVNGFTHRSSMPTTSTPGTSTVDVGTSGTPSSSPSPTTAGPLLMPFTLNFTITNLQYEEDMRRTGSRKFNTMESVLQGLLKPLFKNTSVGPLYSGCRLTLLRPEKDGAATGVDAICTHRLDPKSPGLNREQLYWELSKLTNDIEELGPYTLDRNSLYVNGFTHQSSVSTTSTPGTSTVDLRTSGTPSSLSSPTIMAAGPLLVPFTLNFTITNLQYGEDMGHPGSRKFNTTERVLQGLLGPIFKNTSVGPLYSGCRLTSLRSEKDGAATGVDAICIHHLDPKSPGLNRERLYWELSQLTNGIKELGPYTLDRNSLYVNGFTHRTSVPTSSTPGTSTVDLGTSGTPFSLPSPATAGPLLVLFTLNFTITNLKYEEDMHRPGSRKFNTTERVLQTLLGPMFKNTSVGLLYSGCRLTLLRSEKDGAATGVDAICTHRLDPKSPGVDREQLYWELSQLTNGIKELGPYTLDRNSLYVNGFTHWIPVPTSSTPGTSTVDLGSGTPSSLPSPTTAGPLLVPFTLNFTITNLKYEEDMHCPGSRKFNTTERVLQSLLGPMFKNTSVGPLYSGCRLTLLRSEKDGAATGVDAICTHRLDPKSPGVDREQLYWELSQLTNGIKELGPYTLDRNSLYVNGFTHQTSAPNTSTPGTSTVDLGTSGTPSSLPSPTSAGPLLVPFTLNFTITNLQYEEDMHHPGSRKFNTTERVLQGLLGPMFKNTSVGLLYSGCRLTLLRPEKNGAATGMDAICSHRLDPKSPGLNREQLYWELSQLTHGIKELGPYTLDRNSLYVNGFTHRSSVAPTSTPGTSTVDLGTSGTPSSLPSPTTAVPLLVPFTLNFTITNLQYGEDMRHPGSRKFNTTERVLQGLLGPLFKNSSVGPLYSGCRLISLRSEKDGAATGVDAICTHHLNPQSPGLDREQLYWQLSQMTNGIKELGPYTLDRNSLYVNGFTHRSSGLTTSTPWTSTVDLGTSGTPSPVPSPTTTGPLLVPFTLNFTITNLQYEENMGHPGSRKFNITESVLQGLLKPLFKSTSVGPLYSGCRLTLLRPEKDGVATRVDAICTHRPDPKIPGLDRQQLYWELSQLTHSITELGPYTLDRDSLYVNGFTQRSSVPTTSTPGTFTVQPETSETPSSLPGPTATGPVLLPFTLNFTITNLQYEEDMRRPGSRKFNTTERVLQGLLMPLFKNTSVSSLYSGCRLTLLRPEKDGAATRVDAVCTHRPDPKSPGLDRERLYWKLSQLTHGITELGPYTLDRHSLYVNGFTHQSSMTTTRTPDTSTMHLATSRTPASLSGPMTASPLLVLFTINFTITNLRYEENMHHPGSRKFNTTERVLQGLLRPVFKNTSVGPLYSGCRLTLLRPKKDGAATKVDAICTYRPDPKSPGLDREQLYWELSQLTHSITELGPYTLDRDSLYVNGFTQRSSVPTTSIPGTPTVDLGTSGTPVSKPGPSAASPLLVLFTLNFTITNLRYEENMQHPGSRKFNTTERVLQGLLRSLFKSTSVGPLYSGCRLTLLRPEKDGTATGVDAICTHHPDPKSPRLDREQLYWELSQLTHNITELGPYALDNDSLFVNGFTHRSSVSTTSTPGTPTVYLGASKTPASIFGPSAASHLLILFTLNFTITNLRYEENMWPGSRKFNTTERVLQGLLRPLFKNTSVGPLYSGCRLTLLRPEKDGEATGVDAICTHRPDPTGPGLDREQLYLELSQLTHSITELGPYTLDRDSLYVNGFTHRSSVPTTSTGVVSEEPFTLNFTINNLRYMADMGQPGSLKFNITDNVMQHLLSPLFQRSSLGARYTGCRVIALRSVKNGAETRVDLLCTYLQPLSGPGLPIKQVFHELSQQTHGITRLGPYSLDKDSLYLNGYNEPGPDEPPTTPKPATTFLPPLSEATTAMGYHLKTLTLNFTISNLQYSPDMGKGSATFNSTEGVLQHLLRPLFQKSSMGPFYLGCQLISLRPEKDGAATGVDTTCTYHPDPVGPGLDIQQLYWELSQLTHGVTQLGFYVLDRDSLFINGYAPQNLSIRGEYQINFHIVNWNLSNPDPTSSEYITLLRDIQDKVTTLYKGSQLHDTFRFCLVTNLTMDSVLVTVKALFSSNLDPSLVEQVFLDKTLNASFHWLGSTYQLVDIHVTEMESSVYQPTSSSSTQHFYLNFTITNLPYSQDKAQPGTTNYQRNKRNIEDALNQLFRNSSIKSYFSDCQVSTFRSVPNRHHTGVDSLCNFSPLARRVDRVAIYEEFLRMTRNGTQLQNFTLDRSSVLVDGYSPNRNEPLTGNSDLPFWAVILIGLAGLLGVITCLICGVLVTTRRRKKEGEYNVQQQCPGYYQSHLDLEDLQ

SEQ ID NO: 81 - protein, 143 aa, Homo sapiens
  Carcinoembryonic Antigen Accession No. P78448
MESPSAPPHRWCIPWQRLLLTASLLTFWNPPTTAKLTIESTPFNVAEGKEVLLLVHNLPQHLFGYSWYKGERVDGNRQIIGYVIGTQQATPGPAYSGREIIYPNASLLIQNIIQNDTGFYTLHVIKSDLVNEEATGQFRVYRE

SEQ ID NO: 82 - protein, 151 aa, Homo sapiens [sequence omitted]

SEQ ID NO: 83 - protein, 261 aa, Homo sapiens
  CD40 ligand Accession No. P29965
MIETYNQTSPRSAATGLPISMKIFMYLLTVFLITQMIGSALFAVYLHRRLDKIEDERNLHEDFVFMKTIQRCNTGERSLSLLNCEEIKSQFEGFVKDIMLNKEETKKENSFEMQKGDQNPQIAAHVISEASSKTTSVLQWAEKGYYTMSNNLVTLENGKQLTVKRQGLYYIYAQVTFCSNREASSQAPFIASLCLKSPGRFERILLRAANTHSSAKPCGQQSIHLGGVFELQPGASVFVNVTDPSQVSHGTGFTSFGLLKL

SEQ ID NO: 84 - protein, 1663 aa, Homo sapiens
  Complement 3 Accession No. P01024
MGPTSGPSLLLLLLTHLPLALGSPMYSIITPNILRLESEETMVLEAHDAQGDVPVTVTVHDFPGKKLVLSSEKTVLTPATNHMGNVTFTIPANREFKSEKGRNKFVTVQATFGTQVVEKVVLVSLQSGYLFIQTDKTIYTPGSTVLYRIFTVNHKLLPVGRTVMVNIENPEGIPVKQDSLSSQNQLGVLPLSWDIPELVNMGQWKIRAYYENSPQQVFSTEFEVKEYVLPSFEVIVEPTEKFYYIYNEKGLEVTITARFLYGKKVEGTAFVIFGIQDGEQRISLPESLKRIPIEDGSGEVVLSRKVLLDGVQNPRAEDLVGKSLYVSATVILHSGSDMVQAERSGIPIVTSPYQIHFTKTPKYFKPGMPFDLMVFVTNPDGSPAYRVPVAVQGEDTVQSLTQGDGVAKLSINTHPSQKPLSITVRTKKQELSEAEQATRTMQALPYSTVGNSNNYLHLSVLRTELRPGETLNVNFLLRMDRAHEAKIRYYTYLIMNKGRLLKAGRQVREPGQDLVVLPLSITTDFIPSFRLVAYYTLIGASGQREVVADSVWVDVKDSCVGSLVVKSGQSEDRQPVPGQQMTLKIEGDHGARVVLVAVDKGVFVLNKKNKLTQSKIWDVVEKADIGCTPGSGKDYAGVFSDAGLTFTSSSGQQTAQRAELQCPQPAARRRRSVQLTEKRMDKVGKYPKELRKCCEDGMRENPMRFSCQRRTRFISLGEACKKVFLDCCNYITELRRQHARASHLGLARSNLDEDIIAEENIVSRSEFPESWLWNVEDLKEPPKNGISTKLMNIFLKDSITTWEILAVSMSDKKGICVADPFEVTVMQDFFIDLRLPYSVVRNEQVEIRAVLYNYRQNQELKVRVELLHNPAFCSLATTKRRHQQTVTIPPKSSLSVPYVIVPLKTGLQEVEVKAAVYHHFISDGVRKSLKVVPEGIRMNKTVAVRTLDPERLGREGVQKEDIPPADLSDQVPDTESETRILLQGTPVAQMTEDAVDAERLKHLIVTPSGCGEQNMIGMTPTVIAVHYLDETEQWEKFGLEKRQGALELIKKGYTQQLAFRQPSSAFAAFVKRAPSTWLTAYVVKVFSLAVNLIAIDSQVLCGAVKWLILEKQKPDGVFQEDAPVIHQEMIGGLRNNNEKDMALTAFVLISLQEAKDICEEQVNSLPGSITKAGDFLEANYMNLQRSYTVAIAGYALAQMGRLKGPLLNKFLTTAKDKNRWEDPGKQLYNVEATSYALLALLQLKDFDFVPPVVRWLNEQRYYGGGYGSTQATFMVFQALAQYQKDAPDHQELNLDVSLQLPSRSSKITHRIHWESASLLRSEETKENEGFTVTAEGKGQGTLSVVTMYHAKAKDQLTCNKFDLKVTIKPAPETEKRPQDAKNTMILEICTRYRGDQDATMSILDISMMTGFAPDTDDLKQLANGVDRYISKYELDKAFSDRNTLIIYLDKVSHSEDDCLAFKVHQYFNVELIQPGAVKVYAYYNLEESCTRFYHPEKEDGKLNKLCRDELCRCAEENCFIQKSDDKVTLEERLDKACEPGVDYVYKTRLVKVQLSNDFDEYIMAIEQTIKSGSDEVQVGQQRTFISPIKCREALKLEEKKHYLMWGLSSDFWGEKPNLSYIIGKDTWVEHWPEEDECQDEENQKQCQDLGAFTESMVVFGCPN

SEQ ID NO: 85 - protein, 381 aa, Homo sapiens
  CK-MB Brain Accession No. P12277
MPFSNSHNALKLRFPAEDEFPDLSAHNNHMAKVLTPELYAELRAKSTPSGFTLDDVIQTGVDNPGHPYIMTVGCVAGDEESYEVFKDLFDPIIEDRHGGYKPSDEHKTDLNPDNLQGGDDLDPNYVLSSRVRTGRSIRGFCLPPHCSRGERRAIEKLAVEALSSLDGDLAGRYYALKSMTEAEQQQLIDDHFLFDKPVSPLLLASGMARDWPDARGIWHNDNKTFLVWVNEEDHLRVISMQKGGNMKEVFTRFCTGLTQIETLFKSKDYEFMWNPHLGYILTCPSNLGTGLRAGVHIKLPNLGKHEKFSEVLKRLRLQKRGTGGVDTAAVGGVFDVSNADRLGFSEVELVQMVVDGVKLLIEMEQRLEQGQAIDDLMPAQK

SEQ ID NO: 86 - protein, 381 aa, Homo sapiens
  CK-MB Muscle Accession No. P06732
MPFGNTHNKFKLNYKPEEEYPDLSKHNNHMAKVLTLELYKKLRDKETPSGFTVDDVIQTGVDNPGHPFIMTVGCVAGDEESYEVFKELFDPIISDRHGGYKPTDKHKTDLNHENLKGGDDLDPNYVLSSRVRTGRSIKGYTLPPHCSRGERRAVEKLSVEALNSLTGEFKGKYYPLKSMTEKEQQQLIDDHFLFDKPVSPLLLASGMARDWPDARGIWHNDNKSFLVWVNEEDHLRVISMEKGGNMKEVFRRFCVGLQKIEEIFKKAGHPFMWNQHLGYVLTCPSNLGTGLRGGVHVKLAHLSKHPKFEEILTRLRLQKRGTGGVDTAAVGSVFDVSNADRLGSSEVEQVQLVVDGVKLMVEMEKKLEKGQSIDDMIPAQK

SEQ ID NO: 87 - protein, 212 aa, Homo sapiens
  Endothelin-1 Accession No. P05305
MDYLLMIFSLLFVACQGAPETAVLGAELSAVGENGGEKPTPSPPWRLRRSKRCSCSSLMDKECVYFCHLDIIWVNTPEHVVPYGLGSPRSKRALENLLPTKATDRENRCQCASQKDKKCWNFCQAGKELRAEDIMEKDWNNHKKGKDCSKLGKKCIYQQLVRGRKIRRSSEEHLRQTRSETMRNSVKSSFHDPKLKGKPSRERYVTHNRAHW

SEQ ID NO: 88 - protein, 97 aa, Homo sapiens
  Eotaxin Accession No. P51671
MKVSAALLWLLLIAAAFSPQGLAGPASVPTTCCFNLANRKIPLQRLESYRRITSGKCPQKAVIFKTKLAKDICADPKKKWVQDSMKYLDQKSPTPKP

SEQ ID NO: 89 - protein, 1207 aa, Homo sapiens
  Epidermal Growth Factor Accession No. P01133
MLLTLIILLPVVSKFSFVSLSAPQHWSCPEGTLAGNGNSTCVGPAPFLIFSHGNSIFRIDTEGTNYEQLVVDAGVSVIMDFHYNEKRIYWVDLERQLLQRVFLNGSRQERVCNIEKNVSGMAINWINEEVIWSNQQEGIITVTDMKGNNSHILLSALKYPANVAVDPVERFIFWSSEVAGSLYRADLDGVGVKALLETSEKITAVSLDVLDKRLFWIQYNREGSNSLICSCDYDGGSVHISKHPTQHNLFAMSLFGDRIFYSTWKMKTIWIANKHTGKDMVRINLHSSFVPLGELKVVHPLAQPKAEDDTWEPEQKLCKLRKGNCSSTVCGQDLQSHLCMCAEGYALSRDRKYCEDVNECAFWNHGCTLGCKNTPGSYYCTCPVGFVLLPDGKRCHQLVSCPRNVSECSHDCVLTSEGPLCFCPEGSVLERDGKTCSGCSSPDNGGCSQLCVPLSPVSWECDCFPGYDLQLDEKSCAASGPQPFLLFANSQDIRHMHFDGTDYGTLLSQQMGMVYALDHDPVENKIYFAHTALKWIERANMDGSQRERLIEEGVDVPEGLAVDWIGRRFYWTDRGKSLIGRSDLNGKRSKIITKENISQPRGIAVHPMAKRLFWTDTGINPRIESSSLQGLGRLVIASSDLIWPSGITIDFLTDKLYWCDAKQSVIEMANLDGSKRRRLTQNDVGHPFAVAVFEDYVWFSDWAMPSVIRVNKRTGKDRVRLQGSMLKPSSLVVVHPLAKPGADPCLYQNGGCEHICKKRLGTAWCSCREGFMKASDGKTCLALDGHQLLAGGEVDLKNQVTPLDILSKTRVSEDNITESQHMLVAEIMVSDQDDCAPVGCSMYARCISEGEDATCQCLKGFAGDGKLCSDIDECEMGVPVCPPASSKCINTEGGYVCRCSEGYQGDGIHCLDIDECQLGVHSCGENASCTNTEGGYTCMCAGRLSEPGLICPDSTPPPHLREDDHHYSVRNSDSECPLSHDGYCLHDGVCMYIEALDKYACNCVVGYIGERCQYRDLKWWELRHAGHGQQQKVIVVAVCVVVLVMLLLLSLWGAHYYRTQKLLSKNPKNPYEESSRDVRSRRPADTEDGMSSCPQPWFVVIKEHQDLKNGGQPVAGEDGQAADGSMQPTSWRQEPQLCGMGTEQGCWIPVSSDKGSCPQVMERSFHMPSYGTQTLEGGVEKPHSLLSANPLWQQRALDPPHQMELTQ

SEQ ID NO: 90 - protein, 114 aa, Homo sapiens
  ENA-78 Accession No. P42830
MSLLSSRAARVPGPSSSLCALLVLLLLLTQPGPIASAGPAAAVLRELRCVCLQTTQGVHPKMISNLQVFAIGPQCSKVEVVASLKNGKEICLDPEAPFLKKVIQKILDGGNKEN

SEQ ID NO: 91 - protein, 193 aa, Homo sapiens
  Erythropoietin Accession No. P01588
MGVHECPAWLWLLLSLLSLPLGLPVLGAPPRLICDSRVLERYLLEAKEAENITTGCAEHCSLNENITVPDTKVNFYAWKRMEVGQQAVEVWQGLALLSEAVLRGQALLVNSSQPWEPLQLHVDKAVSGLRSLTTLLRALGAQKEAISPPDAASAAPLRTITADTFRKLFRVYSNFLRGKLKLYTGEACRTGDR

SEQ ID NO: 92 - protein, 92 aa, Homo sapiens
  ENRAGE Accession No. P80511
MTKLEEHLEGIVNIFHQYSVRKGHFDTLSKGELKQLLTKELANTIKNIKDKAVIDEIFQGLDANQDEQVDFQEFISLVAIALKAAHYHTHKE

SEQ ID NO: 93 - protein, 466 aa, Homo sapiens
  Factor VII Accession No. P08709
MVSQALRLLCLLLGLQGCLAAGGVAKASGGETRDMPWKPGPHRVFVTQEEAHGVLHRRRRANAFLEELRPGSLERECKEEQCSFEEAREIFKDAERTKLFWISYSDGDQCASSPCQNGGSCKDQLQSYICFCLPAFEGRNCETHKDDQLICVNENGGCEQYCSDHTGTKRSCRCHEGYSLLADGVSCTPTVEYPCGKIPILEKRNASKPQGRIVGGKVCPKGECPWQVLLLVNGAQLCGGTLINTIWVVSAAHCFDKIKNWRNLIAVLGEHDLSEHDGDEQSRRVAQVIIPSTYVPGTTNHDIALLRLHQPVVLTDHVVPLCLPERTFSERTLAFVRFSLVSGWGQLLDRGATALELMVLNVPRLMTQDCLQQSRKVGDSPNITEYMFCAGYSDGSKDSCKGDSGGPHATHYRGTWYLTGIVSWGQGCATVGHFGVYTRVSQYIEWLQKLMRSEPRPGVLLRAPFP

SEQ ID NO: 94 - protein, 133 aa, Homo sapiens [sequence omitted]

SEQ ID NO: 95 - protein, 183 aa, Homo sapiens
  Ferritin Heavy Chain Accession No. P02794
MTTASTSQVRQNYHQDSEAAINRQINLELYASYVYLSMSYYFDRDDVALKNFAKYFLHQSHEEREHAEKLMKLQNQRGGRIFLQDIKKPDCDDWESGLNAMECALHLEKNVNQSLLELHKLATDKNDPHLCDFIETHYLNEQVKAIKELGDHVTNLRKMGAPESGLAEYLFDKHTLGDSDNES

SEQ ID NO: 96 - protein, 175 aa, Homo sapiens
  Ferritin Light Chain Accession No. P02792
MSSQIRQNYSTDVEAAVNSLVNLYLQASYTYLSLGFYFDRDDVALEGVSHFFRELAEEKREGYERLLKMQNQRGGRALFQDIKKPAEDEWGKTPDAMKAAMALEKKLNQALLDLHALGSARTDPHLCDFLETHFLDEEVKLIKKMGDHLTNLHRLGGPEAGLGEYLFERLTLKHD

SEQ ID NO: 97 - protein, 866 aa, Homo sapiens
  Fibrinogen Alpha chain Accession No. P02671
MFSMRIVCLVLSVVGTAWTADSGEGDFLAEGGGVRGPRVVERHQSACKDSDWPFCSDEDWNYKCPSGCRMKGLIDEVNQDFTNRINKLKNSLFEYQKNNKDSHSLTTNIMEILRGDFSSANNRDNTYNRVSEDLRSRIEVLKRKVIEKVQHIQLLQKNVRAQLVDMKRLEVDIDIKIRSCRGSCSRALAREVDLKDYEDQQKQLEQVIAKDLLPSRDRQHLPLIKMKPVPDLVPGNFKSQLQKVPPEWKALTDMPQMRMELERPGGNEITRGGSTSYGTGSETESPRNPSSAGSWNSGSSGPGSTGNRNPGSSGTGGTATWKPGSSGPGSTGSWNSGSSGTGSTGNQNPGSPRPGSTGTWNPGSSERGSAGHWTSESSVSGSTGQWHSESGSFRPDSPGSGNARPNNPDWGTFEEVSGNVSPGTRREYHTEKLVTSKGDKELRTGKEKVTSGSTTTTRRSCSKTVTKTVIGPDGHKEVTKEVVTSEDGSDCPEAMDLGTLSGIGTLDGFRHRHPDEAAFFDTASTGKTFPGFFSPMLGEFVSETESRGSESGIFTNTKESSSHHPGIAEFPSRGKSSSYSKQFTSSTSYNRGDSTFESKSYKMADEAGSEADHEGTHSTKRGHAKSRPVRDCDDVLQTHPSGTQSGIFNIKLPGSSKIFSVYCDQETSLGGWLLIQQRMDGSLNFNRTWQDYKRGFGSLNDEGEGEFWLGNDYLHLLTQRGSVLRVELEDWAGNEAYAEYHFRVGSEAEGYALQVSSYEGTAGDALIEGSVEEGAEYTSHNNMQFSTFDRDADQWEENCAEVYGGGWWYNNCQAANLNGIYYPGGSYDPRNNSPYEIENGVVWVSFRGADYSLRAVRMKIRPLVTQ

SEQ ID NO: 98 - protein, 491 aa, Homo sapiens
  Fibrinogen Beta chain Accession No. P02675
MKRMVSWSFHKLKTMKHLLLLLLCVFLVKSQGVNDNEEGFFSARGHRPLDKKREEAPSLRPAPPPISGGGYRARPAKAAATQKKVERKAPDAGGCLHADPDLGVLCPTGCQLQEALLQQERPIRNSVDELNNNVEAVSQTSSSSFQYMYLLKDLWQKRQKQVKDNENVVNEYSSELEKHQLYIDETVNSNIPTNLRVLRSILENLRSKIQKLESDVSAQMEYCRTPCTVSCNIPVVSGKECEEIIRKGGETSEMYLIQPDSSVKPYRVYCDMNTENGGWTVIQNRQDGSVDFGRKWDPYKQGFGNVATNTDGKNYCGLPGEYWLGNDKISQLTRMGPTELLIEMEDWKGDKVKAHYGGFTVQNEANKYQISVNKYRGTAGNALMDGASQLMGENRTMTIHNGMFFSTYDRDNDGWLTSDPRKQCSKEDGGGWWYNRCHAANPNGRYYWGGQYTWDMAKHGTDDGVVWMNWKGSWYSMRKMSMKIRPFFPQQ

SEQ ID NO: 99 - protein, 453 aa, Homo sapiens
  Fibrinogen Gamma chain Accession No. P02679
MSWSLHPRNLILYFYALLFLSSTCVAYVATRDNCCILDERFGSYCPTTCGIADFLSTYQTKVDKDLQSLEDILHQVENKTSEVKQLIKAIQLTYNPDESSKPNMIDAATLKSRKMLEEIMKYEASILTHDSSIRYLQEIYNSNNQKIVNLKEKVAQLEAQCQEPCKDTVQIHDITGKDCQDIANKGAKQSGLYFIKPLKANQQFLVYCEIDGSGNGWTVFQKRLDGSVDFKKNWIQYKEGFGHLSPTGTTEFWLGNEKIHLISTQSAIPYALRVELEDWNGRTSTADYAMFKVGPEADKYRLTYAYFAGGDAGDAFDGFDFGDDPSDKFFTSHNGMQFSTWDNDNDKFEGNCAEQDGSGWWMNKCHAGHLNGVYYQGGTYSKASTPNGYDNGIIWATWKTRWYSMKKTTMKIIPFNRLTIGEGQQHHLGGAKQVRPEHPAETEYDSLYPEDDL

SEQ ID NO: 100 - protein, 155 aa, Homo sapiens [sequence omitted]

SEQ ID NO: 101 - protein, 222 aa, Homo sapiens
  GST Accession No. P08263
MAEKPKLHYFNARGRMESTRWLLAAAGVEFEEKFIKSAEDLDKLRNDGYLMFQQVPMVEIDGMKLVQTRAILNYIASKYNLYGKDIKERALIDMYIEGIADLGEMILLLPVCPPEEKDAKLALIKEKIKNRYFPAFEKVLKSHGQDYLVGNKLSRADIHLVELLYYVEELDSSLISSFPLLKALKTRISNLPTVKKFLQPGSPRKPPMDEKSLEEARKIFRF

SEQ ID NO: 102 - protein, 207 aa, Homo sapiens
  G-CSF Accession No. P09919
MAGPATQSPMKLMALQLLLWHSALWTVQEATPLGPASSLPQSFLLKCLEQVRKIQGDGAALQEKLVSECATYKLCHPEELVLLGHSLGIPWAPLSSCPSQALQLAGCLSQLHSGLFLYQGLLQALEGISPELGPTLDTLQLDVADFATTIWQQMEELGMAPALQPTQGAMPAFASAFQRRAGGVLVASHLQSFLEVSYRVLRHLAQP

SEQ ID NO: 103 - protein, 144 aa, Homo sapiens
  GM-CSF Accession No. P04141
MWLQSLLLLGTVACSISAPARSPSPSTQPWEHVNAIQEARRLLNLSRDTAAEMNETVEVISEMFDLQEPTCLQTRLELYKQGLRGSLTKLKGPLTMMASHYKQHCPPTPETSCATQIITFESFKENLKDFLLVIPFDCWEPVQE

SEQ ID NO: 104 - protein, 217 aa, Homo sapiens
  Growth Hormone Accession No. P01241
MATGSRTSLLLAFGLLCLPWLQEGSAFPTIPLSRLFDNAMLRAHRLHQLAFDTYQEFEEAYIPKEQKYSFLQNPQTSLCFSESIPTPSNREETQQKSNLELLRISLLLIQSWLEPVQFLRSVFANSLVYGASDSNVYDLLKDLEEGIQTLMGRLEDGSPRTGQIFKQTYSKFDTNSHNDDALLKNYGLLYCFRKDMDKVETFLRIVQCRSVEGSCGF

SEQ ID NO: 105 - protein, 406 aa, Homo sapiens
  Haptoglobin Accession No. P00738
MSALGAVIALLLWGQLFAVDSGNDVTDIADDGCPKPPEIAHGYVEHSVRYQCKNYYKLRTEGDGVYTLNDKKQWINKAVGDKLPECEADDGCPKPPEIAHGYVEHSVRYQCKNYYKLRTEGDGVYTLNNEKQWINKAVGDKLPECEAVCGKPKNPANPVQRILGGHLDAKGSFPWQAKMVSHHNLTTGATLINEQWLLTTAKNLFLNHSENATAKDIAPTLTLYVGKKQLVEIEKVVLHPNYSQVDIGLIKLKQKVSVNERVMPICLPSKDYAEVGRVGYVSGWGRNANFKFTDHLKYVMLPVADQDQCIRHYEGSTVPEKKTPKSPVGVQPILNEHTFCAGMSKYQEDTCYGDAGSAFAVHDLEEDTWYATGILSFDKSCAVAEYGVYVKVTSIQDWVQKTIAEN

SEQ ID NO: 106 - protein, 110 aa, Homo sapiens
  Insulin Accession No. P01308
MALWMRLLPLLALLALWGPDPAAAFVNQHLCGSHLVEALYLVCGERGFFYTPKTRREAEDLQVGQVELGGGPGAGSLQPLALEGSLQKRGIVEQCCTSICSLYQLENYCN

SEQ ID NO: 107 - protein, 153 aa, Homo sapiens
  IGF-1 Accession No. P01343
MGKISSLPTQLFKCCFCDFLKVKMHTMSSSHLFYLALCLLTFTSSATAGPETLCGAELVDALQFVCGDRGFYFNKPTGYGSSSRRAPQTGIVDECCFRSCDLRRLEMYCAPLKPAKSARSVRAQRHTDMPKTQKEVHLKNASRGSAGNKNYRM

SEQ ID NO: 108 - protein, 532 aa, Homo sapiens
  ICAM-1 Accession No. P05362
MAPSSPRPALPALLVLLGALFPGPGNAQTSVSPSKVILPRGGSVLVTCSTSCDQPKLLGIETPLPKKELLLPGNNRKVYELSNVQEDSQPMCYSNCPDGQSTAKTFLTVYWTPERVELAPLPSWQPVGKNLTLRCQVEGGAPRANLTVVLLRGEKELKREPAVGEPAEVTTTVLVRRDHHGANFSCRTELDLRPQGLELFENTSAPYQLQTFVLPATPPQLVSPRVLEVDTQGTVVCSLDGLFPVSEAQVHLALGDQRLNPTVTYGNDSFSAKASVSVTAEDEGTQRLTCAVILGNQSQETLQTVTIYSFPAPNVILTKPEVSEGTEVTVKCEAHPRAKVTLNGVPAQPLGPRAQLLLKATPEDNGRSFSCSATLEVAGQLIHKNQTRELRVLYGPRLDERDCPGNWTWPENSQQTPMCQAWGNPLPELKCLKDGTFPLPIGESVTVTRDLEGTYLCRARSTQGEVTRKVTVNVLSPRYEIVIITVVAAAVIMGTAGLSTYLYNRQRKIKKYRLQQAQKGTPMKPNTQATPP

SEQ ID NO: 109 - protein, 166 aa, Homo sapiens
  Interferon-gamma Accession No. P01579
MKYTSYILAFQLCIVLGSLGCYCQDPYVKEAENLKKYFNAGHSDVADNGTLFLGILKNWKEESDRKIMQSQIVSFYFKLFKNFKDDQSIQKSVETIKEDMNVKFFNSNKKKRDDFEKLTNYSVTDLNVQRKAIHELIQVMAELSPAAKTGKRKRSQMLFRGRRASQ

SEQ ID NO: 110 - protein, 271 aa, Homo sapiens
  Interleukin-1 alpha Accession No. P01583
MAKVPDMFEDLKNCYSENEEDSSSIDHLSLNQKSFYHVSYGPLHEGCMDQSVSLSISETSKTSKLTFKESMVVVATNGKVLKKRRLSLSQSITDDDLEAIANDSEEEIIKPRSAPFSFLSNVKYNFMRIIKYEFILNDALNQSIIRANDQYLTAAALHNLDEAVKFDMGAYKSSKDDAKITVILRISKTQLYVTAQDEDQPVLLKEMPEIPKTITGSETNLLFFWETHGTKNYFTSVAHPNLFIATKQDYWVCLAGGPPSITDFQILENQA

SEQ ID NO: 111 - protein, 269 aa, Homo sapiens
  Interleukin-1 beta Accession No. P01584
MAEVPELASEMMAYYSGNEDDLFFEADGPKQMKCSFQDLDLCPLDGGIQLRISDHHYSKGFRQAASVVVAMDKLRKMLVPCPQTFQENDLSTFFPFIFEEEPIFFDTWDNEAYVHDAPVRSLNCTLRDSQQKSLVMSGPYELKALHLQGQDMEQQVVFSMSFVQGEESNDKIPVALGLKEKNLYLSCVLKDDKPTLQLESVDPKNYPKKKMEKRFVFNKIEINNKLEFESAQFPNWYISTSQAENMPVFLGGTKGGQDITDFTMQFVSS

SEQ ID NO: 112 - protein, 177 aa, Homo sapiens
  Interleukin-1 ra Accession No. P18510
MEICRGLRSHLITLLLFLFHSETICRPSGRKSSKMQAFRIWDVNQKTFYLRNNQLVAGYLQGPNVNLEEKIDVVPIEPHALFLGIHGGKMCLSCVKSGDETRLQLEAVNITDLSENRKQDKRFAFIRSDSGPTTSFESAACPGWFLCTAMEADQPVSLTNMPDEGVMVTKFYFQEDE

SEQ ID NO: 113 - protein, 153 aa, Homo sapiens
  Interleukin-2 Accession No. P60568
MYRMQLLSCIALSLALVTNSAPTSSSTKKTQLQLEHLLLDLQMILNGINNYKNPKLTRMLTFKFYMPKKATELKHLQCLEEELKPLEEVLNLAQSKNFHLRPRDLISNINVIVLELKGSETTFMCEYADETATIVEFLNRWITFCQSIISTLT

SEQ ID NO: 114 - protein, 152 aa, Homo sapiens
  Interleukin-3 Accession No. P08700
MSRLPVLLLLQLLVRPGLQAPMTQTTPLKTSWVNCSNMIDEIITHLKQPPLPLLDFNNLNGEDQDILMENNLRRPNLEAFNRAVKSLQNASAIESILKNLLPCLPLATAAPTRHPIHIKDGDWNEFRRKLTFYLKTLENAQAQQTTLSLAIF

SEQ ID NO: 115 - protein, 153 aa, Homo sapiens [sequence omitted]

SEQ ID NO: 116 - protein, 134 aa, Homo sapiens
  Interleukin-5 Accession No. P05113
MRMLLHLSLLALGAAYVYAIPTEIPTSALVKETLALLSTHRTLLIANETLRIPVPVHKNHQLCTEEIFQGIGTLESQTVQGGTVERLFKNLSLIKKYIDGQKKKCGEERRRVNQFLDYLQEFLGVMNTEWIIES

SEQ ID NO: 117 - protein, 212 aa, Homo sapiens
  Interleukin-6 Accession No. P05231
MNSFSTSAFGPVAFSLGLLLVLPAAFPAPVPPGEDSKDVAAPHRQPLTSSERIDKQIRYILDGISALRKETCNKSNMCESSKEALAENNLNLPKMAEKDGCFQSGFNEETCLVKIITGLLEFEVYLEYLQNRFESSEEQARAVQMSTKVLIQFLQKKAKNLDAITTPDPTTNASLLTKLQAQNQWLQDMTTHLILRSFKEFLQSSLRALRQM

SEQ ID NO: 118 - protein, 177 aa, Homo sapiens
  Interleukin-7 Accession No. P13232
MFHVSFRYIFGLPPLILVLLPVASSDCDIEGKDGKQYESVLMVSIDQLLDSMKEIGSNCLNNEFNFFKRHICDANKEGMFLFRAARKLRQFLKMNSTGDFDLHLLKVSEGTTILLNCTGQVKGRKPAALGEAQPTKSLEENKSLKEQKKLNDLCFLKRLLQEIKTCWNKILMGTKEH

SEQ ID NO: 119 - protein, 99 aa, Homo sapiens
  Interleukin-8 Accession No. P10145
MTSKLAVALLAAFLISAALCEGAVLPRSAKELRCQCIKTYSKPFHPKFIKELRVIESGPHCANTEIIVKLSDGRELCLDPKENWVQRVVEKFLKRAENS

SEQ ID NO: 120 - protein, 178 aa, Homo sapiens
  Interleukin-10 Accession No. P22301
MHSSALLCCLVLLTGVRASPGQGTQSENSCTHFPGNLPNMLRDLRDAFSRVKTFFQMKDQLDNLLLKESLLEDFKGYLGCQALSEMIQFYLEEVMPQAENQDPDIKAHVNSLGENLKTLRLRLRRCHRFLPCENKSKAVEQVKNAFNKLQEKGIYKAMSEFDIFINYIEAYMTMKIRN

SEQ ID NO: 121 - protein, 328 aa, Homo sapiens
  Interleukin-12 p40 Accession No. P29460
MCHQQLVISWFSLVFLASPLVAIWELKKDVYVVELDWYPDAPGEMVVLTCDTPEEDGITWTLDQSSEVLGSGKTLTIQVKEFGDAGQYTCHKGGEVLSHSLLLLHKKEDGIWSTDILKDQKEPKNKTFLRCEAKNYSGRFTCWWLTTISTDLTFSVKSSRGSSDPQGVTCGAATLSAERVRGDNKEYEYSVECQEDSACPAAEESLPIEVMVDAVHKLKYENYTSSFFIRDIIKPDPPKNLQLKPLKNSRQVEVSWEYPDTWSTPHSYFSLTFCVQVQGKSKREKKDRVFTDKTSATVICRKNASISVRAQDRYYSSSWSEWASVPCS

SEQ ID NO: 122 - protein, 219 aa, Homo sapiens
  Interleukin-12 p35 Accession No. P29549
MCPARSLLLVATLVLLDHLSLARNLPVATPDPGMFPCLHHSQNLLRAVSNMLQKARQTLEFYPCTSEEIDHEDITKDKTSTVEACLPLELTKNESCLNSRETSFITNGSCLASRKTSFMMALCLSSIYEDLKMYQVEFKTMNAKLLMDPKRQIFLDQNMLAVIDELMQALNFNSETVPQKSSLEEPDFYKTKIKLCILLHAFRIRAVTIDRVMSYLNAS

SEQ ID NO: 123 - protein, 132 aa, Homo sapiens
  Interleukin-13 Accession No. P35225
MALLLTTVIALTCLGGFASPGPVPPSTALRELIEELVNITQNQKAPLCNGSMVWSINLTAGMYCAALESLINVSGCSAIEKTQRMLSGFCPHKVSAGQFSSLHVRDTKIEVAQFVKDLLLHLKKLFREGRFN

SEQ ID NO: 124 - protein, 162 aa, Homo sapiens
  Interleukin-15 Accession No. P40933
MRISKPHLRSISIQCYLCLLLNSHFLTEAGIHVFILGCFSAGLPKTEANWVNVISDLKKIEDLIQSMHIDATLYTESDVHPSCKVTAMKCFLLELQVISLESGDASIHDTVENLIILANNSLSSNGNVTESGCKECEELEEKNIKEFLQSFVHIVQMFINTS

SEQ ID NO: 125 - protein, 631 aa, Homo sapiens
  Interleukin-16 Accession No. Q14005
MDYSFDTTAEDPWVRISDCIKNLFSPIMSENHGHMPLQPNASLNEEEGTQGHPDGTPPKLDTANGTPKVYKSADSSTVKKGPPVAPKPAWFRQSLKGLRNRASDPRGLPDPALSTQPAPASREHLGSHIRASSSSSSIRQRISSFETFGSSQLPDKGAQRLSLQPSSGEAAKPLGKHEEGRFSGLLGRGAAPTLVPQQPEQVLSSGSPAASEARDPGVSESPPPGRQPNQKTLPPGPDPLLRLLSTQAEESQGPVLKMPSQRARSFPLTRSQSCETKLLDEKTSKLYSISSQVSSAVMKSLLCLPSSISCAQTPCIPKEGASPTSSSNEDSAANGSAETSALDTGFSLNLSELREYTEGLTEAKEDDDGDHSSLQSGQSVISLLSSEELKKLIEEVKVLDEATLKQLDGIHVTILHKEEGAGLGFSLAGGADLENKVITVHRVFPNGLASQEGTIQKGNEVLSINGKSLKGTTHHDALAILRQAREPRQAVIVTRKLTPEAMPDLNSSTDSAASASAASDVSVESTAEATVCTVTLEKMSAGLGFSLEGGKGSLHGDKPLTINRIFKGAASEQSETVQPGDEILQLGGTAMQGLTRFEAWNIIKALPDGPVTIVIRRKSLQSKETTAAGDS

SEQ ID NO: 126 - protein, 167 aa, Homo sapiens
  Leptin Accession No. P41159
MHWGTLCGFLWLWPYLFYVQAVPIQKVQDDTKTLIKTIVTRINDISHTQSVSSKQKVTGLDFIPGLHPILTLSKMDQTLAVYQQILTSMPSRNVIQISNDLENLRDLLHVLAFSKSCHLPWASGLETLDSLGGVLEASGYSTEVVALSRLQGSLQDMLWQLDLSPGC

SEQ ID NO: 127 - protein, 4548 aa, Homo sapiens
  Lipoprotein (a) Accession No. P08519
MEHKEVVLLLLLFLKSAAPEQSHVVQDCYHGDGQSYRGTYSTTVTGRTCQAWSSMTPHQHNRTTENYPNAGLIMNYCRNPDAVAAPYCYTRDPGVRWEYCNLTQCSDAEGTAVAPPTVTPVPSLEAPSEQAPTEQRPGVQECYHGNGQSYRGTYSTTVTGRTCQAWSSMTPHSHSRTPEYYPNAGLIMNYCRNPDAVAAPYCYTRDPGVRWEYCNLTQCSDAEGTAVAPPTVTPVPSLEAPSEQAPTEQRPGVQECYHGNGQSYRGTYSTTVTGRTCQAWSSMTPHSHSRTPEYYPNAGLIMNYCRNPDAVAAPYCYTRDPGVRWEYCNLTQCSDAEGTAVAPPTVTPVPSLEAPSEQAPTEQRPGVQECYHGNGQSYRGTYSTTVTGRTCQAWSSMTPHSHSRTPEYYPNAGLIMNYCRNPDAVAAPYCYTRDPGVRWEYCNLTQCSDAEGTAVAPPTVTPVPSLEAPSEQAPTEQRPGVQECYHGNGQSYRGTYSTTVTGRTCQAWSSMTPHSHSRTPEYYPNAGLIMNYCRNPDAVAAPYCYTRDPGVRWEYCNLTQCSDAEGTAVAPPTVTPVPSLEAPSEQAPTEQRPGVQECYHGNGQSYRGTYSTTVTGRTCQAWSSMTPHSHSRTPEYYPNAGLIMNYCRNPDAVAAPYCYTRDPGVRWEYCNLTQCSDAEGTAVAPPTVTPVPSLEAPSEQAPTEQRPGVQECYHGNGQSYRGTYSTTVTGRTCQAWSSMTPHSHSRTPEYYPNAGLIMNYCRNPDAVAAPYCYTRDPGVRWEYCNLTQCSDAEGTAVAPPTVTPVPSLEAPSEQAPTEQRPGVQECYHGNGQSYRGTYSTTVTGRTCQAWSSMTPHSHSRTPEYYPNAGLIMNYCRNPDAVAAPYCYTRDPGVRWEYCNLTQCSDAEGTAVAPPTVTPVPSLEAPSEQAPTEQRPGVQECYHGNGQSYRGTYSTTVTGRTCQAWSSMTPHSHSRTPEYYPNAGLIMNYCRNPDAVAAPYCYTRDPGVRWEYCNLTQCSDAEGTAVAPPTVTPVPSLEAPSEQAPTEQRPGVQECYHGNGQSYRGTYSTTVTGRTCQAWSSMTPHSHSRTPEYYPNAGLIMNYCRNPDAVAAPYCYTRDPGVRWEYCNLTQCSDAEGTAVAPPTVTPVPSLEAPSEQAPTEQRPGVQECYHGNGQSYRGTYSTTVTGRTCQAWSSMTPHSHSRTPEYYPNAGLIMNYCRNPDAVAAPYCYTRDPGVRWEYCNLTQCSDAEGTAVAPPTVTPVPSLEAPSEQAPTEQRPGVQECYHGNGQSYRGTYSTTVTGRTCQAWSSMTPHSHSRTPEYYPNAGLIMNYCRNPDAVAAPYCYTRDPGVRWEYCNLTQCSDAEGTAVAPPTVTPVPSLEAPSEQAPTEQRPGVQECYHGNGQSYRGTYSTTVTGRTCQAWSSMTPHSHSRTPEYYPNAGLIMNYCRNPDAVAAPYCYTRDPGVRWEYCNLTQCSDAEGTAVAPPTVTPVPSLEAPSEQAPTEQRPGVQECYHGNGQSYRGTYSTTVTGRTCQAWSSMTPHSHSRTPEYYPNAGLIMNYCRNPDAVAAPYCYTRDPGVRWEYCNLTQCSDAEGTAVAPPTVTPVPSLEAPSEQAPTEQRPGVQECYHGNGQSYRGTYSTTVTGRTCQAWSSMTPHSHSRTPEYYPNAGLIMNYCRNPDAVAAPYCYTRDPGVRWEYCNLTQCSDAEGTAVAPPTVTPVPSLEAPSEQAPTEQRPGVQECYHGNGQSYRGTYSTTVTGRTCQAWSSMTPHSHSRTPEYYPNAGLIMNYCRNPDAVAAPYCYTRDPGVRWEYCNLTQCSDAEGTAVAPPTVTPVPSLEAPSEQAPTEQRPGVQECYHGNGQSYRGTYSTTVTGRTCQAWSSMTPHSHSRTPEYYPNAGLIMNYCRNPDAVAAPYCYTRDPGVRWEYCNLTQCSDAEGTAVAPPTVTPVPSLEAPSEQAPTEQRPGVQECYHGNGQSYRGTYSTTVTGRTCQAWSSMTPHSHSRTPEYYPNAGLIMNYCRNPDAVAAPYCYTRDPGVRWEYCNLTQCSDAEGTAVAPPTVTPVPSLEAPSEQAPTEQRPGVQECYHGNGQSYRGTYSTTVTGRTCQAWSSMTPHSHSRTPEYYPNAGLIMNYCRNPDAVAAPYCYTRDPGVRWEYCNLTQCSDAEGTAVAPPTVTPVPSLEAPSEQAPTEQRPGVQECYHGNGQSYRGTYSTTVTGRTCQAWSSMTPHSHSRTPEYYPNAGLIMNYCRNPDAVAAPYCYTRDPGVRWEYCNLTQCSDAEGTAVAPPTVTPVPSLEAPSEQAPTEQRPGVQECYHGNGQSYRGTYSTTVTGRTCQAWSSMTPHSHSRTPEYYPNAGLIMNYCRNPDAVAAPYCYTRDPGVRWEYCNLTQCSDAEGTAVAPPTVTPVPSLEAPSEQAPTEQRPGVQECYHGNGQSYRGTYSTTVTGRTCQAWSSMTPHSHSRTPEYYPNAGLIMNYCRNPDAVAAPYCYTRDPGVRWEYCNLTQCSDAEGTAVAPPTVTPVPSLEAPSEQAPTEQRPGVQECYHGNGQSYRGTYSTTVTGRTCQAWSSMTPHSHSRTPEYYPNAGLIMNYCRNPDAVAAPYCYTRDPGVRWEYCNLTQCSDAEGTAVAPPTVTPVPSLEAPSEQAPTEQRPGVQECYHGNGQSYRGTYSTTVTGRTCQAWSSMTPHSHSRTPEYYPNAGLIMNYCRNPDAVAAPYCYTRDPGVRWEYCNLTQCSDAEGTAVAPPTVTPVPSLEAPSEQAPTEQRPGVQECYHGNGQSYRGTYSTTVTGRTCQAWSSMTPHSHSRTPEYYPNAGLIMNYCRNPDAVAAPYCYTRDPGVRWEYCNLTQCSDAEGTAVAPPTVTPVPSLEAPSEQAPTEQRPGVQECYHGNGQSYRGTYSTTVTGRTCQAWSSMTPHSHSRTPEYYPNAGLIMNYCRNPDAVAAPYCYTRDPGVRWEYCNLTQCSDAEGTAVAPPTVTPVPSLEAPSEQAPTEQRPGVQECYHGNGQSYRGTYSTTVTGRTCQAWSSMTPHSHSRTPEYYPNAGLIMNYCRNPDAVAAPYCYTRDPGVRWEYCNLTQCSDAEGTAVAPPTVTPVPSLEAPSEQAPTEQRPGVQECYHGNGQSYRGTYSTTVTGRTCQAWSSMTPHSHSRTPEYYPNAGLIMNYCRNPDAVAAPYCYTRDPGVRWEYCNLTQCSDAEGTAVAPPTVTPVPSLEAPSEQAPTEQRPGVQECYHGNGQSYRGTYSTTVTGRTCQAWSSMTPHSHSRTPEYYPNAGLIMNYCRNPDAVAAPYCYTRDPGVRWEYCNLTQCSDAEGTAVAPPTVTPVPSLEAPSEQAPTEQRPGVQECYHGNGQSYRGTYSTTVTGRTCQAWSSMTPHSHSRTPEYYPNAGLIMNYCRNPDPVAAPYCYTRDPSVRWEYCNLTQCSDAEGTAVAPPTITPIPSLEAPSEQAPTEQRPGVQECYHGNGQSYQGTYFITVTGRTCQAWSSMTPHSHSRTPAYYPNAGLIKNYCRNPDPVAAPWCYTTDPSVRWEYCNLTRCSDAEWTAFVPPNVILAPSLEAFFEQALTEETPGVQDCYYHYGQSYRGTYSTTVTGRTCQAWSSMTPHQHSRTPENYPNAGLTRNYCRNPDAEIRPWCYTMDPSVRWEYCNLTQCLVTESSVLATLTVVPDPSTEASSEEAPTEQSPGVQDCYHGDGQSYRGSFSTTVTGRTCQSWSSMTPHWHQRTTEYYPNGGLTRNYCRNPDAEISPWCYTMDPNVRWEYCNLTQCPVTESSVLATSTAVSEQAPTEQSPTVQDCYHGDGQSYRGSFSTTVTGRTCQSWSSMTPHWHQRTTEYYPNGGLTRNYCRNPDAEIRPWCYTMDPSVRWEYCNLTQCPVMESTLLTTPTVVPVPSTELPSEEAPTENSTGVQDCYRGDGQSYRGTLSTTITGRTCQSWSSMTPHWHRRIPLYYPNAGLTRNYCRNPDAEIRPWCYTMDPSVRWEYCNLTRCPVTESSVLTTPTVAPVPSTEAPSEQAPPEKSPVVQDCYHGDGRSYRGISSTTVTGRTCQSWSSMIPHWHQRTPENYPNAGLTENYCRNPDSGKQPWCYTTDPCVRWEYCNLTQCSETESGVLETPTVVPVPSMEAHSEAAPTEQTPVVRQCYHGNGQSYRGTFSTTVTGRTCQSWSSMTPHRHQRTPENYPNDGLTMNYCRNPDADTGPWCFTMDPSIRWEYCNLTRCSDTEGTVVAPPTVIQVPSLGPPSEQDCMFGNGKGYRGKKATTVTGTPCQEWAAQEPHRHSTFIPGTNKWAGLEKNYCRNPDGDINGPWCYTMNPRKLFDYCDIPLCASSSFDCGKPQVEPKKCPGSIVGGCVAHPHSWPWQVSLRTRFGKHFCGGTLISPEWVLTAAHCLKKSSRPSSYKVILGAHQEVNLESHVQEIEVSRLFLEPTQADIALLKLSRPAVITDKVMPACLPSPDYMVTARTECYITGWGETQGTFGTGLLKEAQLLVIENEVCNHYKYICAEHLARGTDSCQGDSGGPLVCFEKDKYILQGVTSWGLGCARPNKPGVYARVSRFVTWIEGMMRNN

SEQ ID NO: 128 - protein, 114 aa, Homo sapiens
  Lymphotactin Accession No. P47992
MRLLILALLGICSLTAYIVEGVGSEVSDKRTCVSLTTQRLPVSRIKTYTITEGSLRAVIFITKRGLKVCADPQATWVRDVVRSMDRKSNTRNNMIQTKPTGTQQSTNTAVTLTG

SEQ ID NO: 129 - protein, 93 aa, Homo sapiens
  MDC Accession No. O00626
MARLQTALLVVLVLLAVALQATEAGPYGANMEDSVCCRDYVRYRLPLRVVKHFYWTSDSCPRPGVVLLTFRDKEICADPRVPWVKMILNKLSQ

SEQ ID NO: 130 - protein, 92 aa, Homo sapiens
  MIP-1 alpha Accession No. P10147
MQVSTAALAVLLCTMALCNQFSASLAADTPTACCFSYTSRQIPQNFIADYFETSSQCSKPGVIFLTKRSRQVCADPSEEWVQKYVSDLELSA

SEQ ID NO: 131 - protein, 92 aa, Homo sapiens
  MIP-1 beta Accession No. P13236
MKLCVTVLSLLMLVAAFCSPALSAPMGSDPPTACCFSYTARKLPRNFVVDYYETSSLCSQPAVVFQTKRSKQVCADPSESWVQEYVYDLELN

SEQ ID NO: 132 - protein, 660 aa, Homo sapiens
  MMP-2 Accession No. P08253
MEALMARGALTGPLRALCLLGCLLSHAAAAPSPIIKFPGDVAPKTDKELAVQYLNTFYGCPKESCNLFVLKDTLKKMQKFFGLPQTGDLDQNTIETMRKPRCGNPDVANYNFFPRKPKWDKNQITYRIIGYTPDLDPETVDDAFARAFQVWSDVTPLRFSRIHDGEADIMINFGRWEHGDGYPFDGKDGLLAHAFAPGTGVGGDSHFDDDELWTLGEGQVVRVKYGNADGEYCKFPFLFNGKEYNSCTDTGRSDGFLWCSTTYNFEKDGKYGFCPHEALFTMGGNAEGQPCKFPFRFQGTSYDSCTTEGRTDGYRWCGTTEDYDRDKKYGFCPETAMSTVGGNSEGAPCVFPFTFLGNKYESCTSAGRSDGKMWCATTANYDDDRKWGFCPDQGYSLFLVAAHEFGHAMGLEHSQDPGALMAPIYTYTKNFRLSQDDIKGIQELYGASPDIDLGTGPTPTLGPVTPEICKQDIVFDGIAQIRGEIFFFKDRFIWRTVTPRDKPMGPLLVATFWPELPEKIDAVYEAPQEEKAVFFAGNEYWIYSASTLERGYPKPLTSLGLPPDVQRVDAAFNWSKNKKTYIFAGDKFWRYNEVKKKMDPGFPKLIADAWNAIPDNLDAVVDLQGGGHSYFFKGAYYLKLENQSLKSVKFGSIKSDWLGC

SEQ ID NO: 133 - protein, 477 aa, Homo sapiens
  MMP-3 Accession No. P08254
MKSLPILLLLCVAVCSAYPLDGAARGEDTSMNLVQKYLENYYDLKKDVKQFVRRKDSGPVVKKIREMQKFLGLEVTGKLDSDTLEVMRKPRCGVPDVGHFRTFPGIPKWRKTHLTYRIVNYTPDLPKDAVDSAVEKALKVWEEVTPLTFSRLYEGEADIMISFAVREHGDFYPFDGPGNVLAHAYAPGPGINGDAHFDDDEQWTKDTTGTNLFLVAAHEIGHSLGLFHSANTEALMYPLYHSLTDLTRFRLSQDDINGIQSLYGPPPDSPETPLVPTEPVPPEPGTPANCDPALSFDAVSTLRGEILIFKDRHFWRKSLRKLEPELHLISSFWPSLPSGVDAAYEVTSKDLVFIFKGNQFWAIRGNEVRAGYPRGIHTLGFPPTVRKIDAAISDKEKNKTYFFVEDKYWRFDEKRNSMEPGFPKQIAEDFPGIDSKIDAVFEEFGFFYFFTGSSQLEFDPNAKKVTHTLKSNSWLNC

SEQ ID NO: 134 - protein, 707 aa, Homo sapiens [sequence omitted]

SEQ ID NO: 135 - protein, 99 aa, Homo sapiens
  MCP-1 Accession No. P13500
MKVSAALLCLLLIAATFIPQGLAQPDAINAPVTCCYNFTNRKISVQRLASYRRITSSKCPKEAVIFKTIVAKEICADPKQKWVQDSMDHLDKQTQTPKT

SEQ ID NO: 136 - protein, 745 aa, Homo sapiens
  Myeloperoxidase Accession No. P05164
MGVPFFSSLRCMVDLGPCWAGGLTAEMKLLLALAGLLAILATPQPSEGAAPAVLGEVDTSLVLSSMEEAKQLVDKAYKERRESIKQRLRSGSASPMELLSYFKQPVAATRTAVRAADYLHVALDLLERKLRSLWRRPFNVTDVLTPAQLNVLSKSSGCAYQDVGVTCPEQDKYRTITGMCNNRRSPTLGASNRAFVRWLPAEYEDGFSLPYGWTPGVKRNGFPVALARAVSNEIVRFPTDQLTPDQERSLMFMQWGQLLDHDLDFTPEPAARASFVTGVNCETSCVQQPPCFPLKIPPNDPRIKNQADCIPFFRSCPACPGSNITIRNQINALTSFVDASMVYGSEEPLARNLRNMSNQLGLLAVNQRFQDNGRALLPFDNLHDDPCLLTNRSARIPCFLAGDTRSSEMPELTSMHTLLLREHNRLATELKSLNPRWDGERLYQEARKIVGAMVQIITYRDYLPLVLGPTAMRKYLPTYRSYNDSVDPRIANVFTNAFRYGHTLIQPFMFRLDNRYQPMEPNPRVPLSRVFFASWRVVLEGGIDPILRGLMATPAKLNRQNQIAVDEIRERLFEQVMRIGLDLPALNMQRSRDHGLPGYNAWRRFCGLPQPETVGQLGTVLRNLKLARKLMEQYGTPNNIDIWMGGVSEPLKRKGRVGPLLACIIGTQFRKLRDGDRFWWENEGVFSMQQRQALAQISLPRIICDNTGITTVSKNNIFMSNSYPRDFVNCSTLPALNLASWREAS

SEQ ID NO: 137 - protein, 154 aa, Homo sapiens
  Myoglobin Accession No. P02144
MGLSDGEWQLVLNVWGKVEADIPGHGQEVLIRLFKGHPETLEKFDKFKHLKSEDEMKASEDLKKHGATVLTALGGILKKKGHHEAEIKPLAQSHATKHKIPVKYLEFISECIIQVLQSKHPGDFGADAQGAMNKALELFRKDMASNYKELGFQG

SEQ ID NO: 138 - protein, 402 aa, Homo sapiens [sequence omitted]

SEQ ID NO: 139 - protein, 1628 aa, Homo sapiens
  PAPP-A Accession No. Q13219
MRLWSWVLHLGLLSAALGCGLAERPRRARRDPRAGRPPRPAAGPATCATRAARGRRASPPPPPPPGGAWEAVRVPRRRQQREARGATEEPSPPSRALYFSGRGEQLRVLRADLELPRDAFTLQVWLRAEGGQRSPAVITGLYDKCSYISRDRGWVVGIHTISDQDNKDPRYFFSLKTDRARQVTTINAHRSYLPGQWVYLAATYDGQFMKLYVNGAQVATSGEQVGGIFSPLTQKCKVLMLGGSALNHNYRGYIEHFSLWKVARTQREILSDMETHGAHTALPQLLLQENWDNVKHAWSPMKDGSSPKVEFSNAHGFLLDTSLEPPLCGQTLCDNTEVIASYNQLSSFRQPKVVRYRVVNLYEDDHKNPTVTREQVDFQHHQLAEAFKQYNISWELDVLEVSNSSLRRRLILANCDISKIGDENCDPECNHTLTGHDGGDCRHLRHPAFVKKQHNGVCDMDCNYERFNFDGGECCDPEITNVTQTCFDPDSPHRAYLDVNELKNILKLDGSTHLNIFFAKSSEEELAGVATWPWDKEALMHLGGIVLNPSFYGMPGHTHTMIHEIGHSLGLYHVFRGISEIQSCSDPCMETEPSFETGDLCNDTNPAPKHKSCGDPGPGNDTCGFHSFFNTPYNNFMSYADDDCTDSFTPNQVARMHCYLDLVYQGWQPSRKPAPVALAPQVLGHTTDSVTLEWFPPIDGHFFERELGSACHLCLEGRILVQYASNASSPMPCSPSGHWSPREAEGHPDVEQPCKSSVRTWSPNSAVNPHTVPPACPEPQGCYLELEFLYPLVPESLTIWVTFVSTDWDSSGAVNDIKLLAVSGKNISLGPQNVFCDVPLTIRLWDVGEEVYGIQIYTLDEHLEIDAAMLTSTADTPLCLQCKPLKYKVVRDPPLQMDVASILHLNRKFVDMDLNLGSVYQYWVITISGTEESEPSPAVTYIHGRGYCGDGIIQKDQGEQCDDMNKINGDGCSLFCRQEVSFNCIDEPSRCYFHDGDGVCEEFEQKTSIKDCGVYTPQGFLDQWASNASVSHQDQQCPGWVIIGQPAASQVCRTKVIDLSEGISQHAWYPCTISYPYSQLAQTTFWLRAYFSQPMVAAAVIVHLVTDGTYYGDQKQETISVQLLDTKDQSHDLGLHVLSCRNNPLIIPVVHDLSQPFYHSQAVRVSFSSPLVAISGVALRSFDNFDPVTLSSCQRGETYSPAEQSCVHFACEKTDCPELAVENASLNCSSSDRYHGAQCTVSCRTGYVLQIRRDDELIKSQTGPSVTVTCTEGKWNKQVACEPVDCSIPDHHQVYAASFSCPEGTTFGSQCSFQCRHPAQLKGNNSLLTCMEDGLWSFPEALCELMCLAPPPVPNADLQTARCRENKHKVGSFCKYKCKPGYHVPGSSRKSKKRAFKTQCTQDGSWQEGACVPVTCDPPPPKFHGLYQCTNGFQFNSECRIKCEDSDASQGLGSNVIHCRKDGTWNGSFHVCQEMQGQCSVPNELNSNLKLQCPDGYAIGSECATSCLDHNSESIILPMNVTVRDIPHWLNPTRVERVVCTAGLKWYPHPALIHCVKGCEPFMGDNYCDAINNRAFCNYDGGDCCTSTVKTKKVTPFPMSCDLQGDCACRDPQAQEHSRKDLRGYSHG

SEQ ID NO: 140 - protein, 261 aa, Homo sapiens
  PSA, Free Accession No. P07288
MWVPVVFLTLSVTWIGAAPLILSRIVGGWECEKHSQPWQVLVASRGRAVCGGVLVHPQWVLTAAHCIRNKSVILLGRHSLFHPEDTGQVFQVSHSFPHPLYDMSLLKNRFLRPGDDSSHDLMLLRLSEPAELTDAVKVMDLPTQEPALGTTCYASGWGSIEPEEFLTPKKLQCVDLHVISNDVCAQVHPQKVTKFMLCAGRWTGGKSTCSGDSGGPLVCNGVLQGITSWGSEPCALPERPSLYTKVVHYRKWIKDTIVANP

SEQ ID NO: 141 - protein, 386 aa, Homo sapiens
  Prostatic Acid Phosphatase Accession No. P15309
MRAAPLLLARAASLSLGFLFLLFFWLDRSVLAKELKFVTLVFRHGDRSPIDTFPTDPIKESSWPQGFGQLTQLGMEQHYELGEYIRKRYRKFLNESYKHEQVYIRSTDVDRTLMSAMTNLAALFPPEGVSIWNPILLWQPIPVHTVPLSEDQLLYLPFRNCPRFQELESETLKSEEFQKRLHPYKDFIATLGKLSGLHGQDLFGIWSKVYDPLYCESVHNFTLPSWATEDTMTKLRELSELSLLSLYGIHKQKEKSRLQGGVLVNEILNHMKRATQIPSYKKLIMYSAHDTTVSGLQMALDVYNGLLPPYASCHLTELYFEKGEYFVEMYYRNETQHEPYPLMLPGCSPSCPLERFAELVGPVIPQDWSTECMTTNSHQGTEDSTD

SEQ ID NO: 142 - protein, 91 aa, Homo sapiens
  RANTES Accession No. P13501
MKVSAAALAVILIATALCAPASASPYSSDTTPCCFAYIARPLPRAHIKEYFYTSGKCSNPAVVFVTRKNRQVCANPEKKWVREYINSLEMS

SEQ ID NO: 143 - protein, 223 aa, Homo sapiens
  Serum Amyloid P Accession No. P02743
MNKPLLWISVLTSLLEAFAHTDLSGKVFVFPRESVTDHVNLITPLEKPLQNFTLCFRAYSDLSRAYSLFSYNTQGRDNELLVYKERVGEYSLYIGRHKVTSKVIEKFPAPVHICVSWESSSGIAEFWINGTPLVKKGLRQGYFVEAQPKIVLGQEQDSYGGKFDRSQSFVGEIGDLYMWDSVLPPENILSAYQGTPLPANILDWQALNYEIRGYVIIKPLVWV

SEQ ID NO: 144 - protein, 413 aa, Homo sapiens
  SGOT Accession No. P17174
MAPPSVFAEVPQAQPVLVFKLTADFREDPDPRKVNLGVGAYRTDDCHPWVLPVVKKVEQKIANDNSLNHEYLPILGLAEFRSCASRLALGDDSPALKEKRVGGVQSLGGTGALRIGADFLARWYNGTNNKNTPVYVSSPTWENHNAVFSAAGFKDIRSYRYWDAEKRGLDLQGFLNDLENAPEFSIVVLHACAHNPTGIDPTPEQWKQIASVMKHRFLFPFFDSAYQGFASGNLERDAWAIRYFVSEGFEFFCAQSFSKNFGLYNERVGNLTVVGKEPESILQVLSQMEKIVRITWSNPPAQGARIVASTLSNPELFEEWTGNVKTMADRILTMRSELRARLEALKTPGTWNHITDQIGMFSFTGLNPKQVEYLVNEKHIYLLPSGRINVSGLTTKNLDYVATSIHEAVTKIQ

SEQ ID NO: 145 - protein, 402 aa, Homo sapiens
  Sex Hormone Binding Globulin Accession No. P04278
MESRGPLATSRLLLLLLLLLLRHTRQGWALRPVLPTQSAHDPPAVHLSNGPGQEPIAVMTFDLTKITKTSSSFEVRTWDPEGVIFYGDTNPKDDWFMLGLRDGRPEIQLHNHWAQLTVGAGPRLDDGRWHQVEVKMEGDSVLLEVDGEEVLRLRQVSGPLTSKRHPIMRIALGGLLFPASNLRLPLVPALDGCLRRDSWLDKQAEISASAPTSLRSCDVESNPGIFLPPGTQAEFNLRDIPQPHAEPWAFSLDLGLKQAAGSGHLLALGTPENPSWLSLHLQDQKVVLSSGSGPGLDLPLVLGLPLQLKLSMSRVVLSQGSKMKALALPPLGLAPLLNLWAKPQGRLFLGALPGEDSSTSFCLNGLWAQGQRLDVDQALNRSHEIWTHSCPQSPGNGTDASH

SEQ ID NO: 146 - protein, 273 aa, Homo sapiens
  Human Stem Cell Factor Accession No. P21583
MKKTQTWILTCIYLQLLLFNPLVKTEGICRNRVTNNVKDVTKLVANLPKDYMITLKYVPGMDVLPSHCWISEMVVQLSDSLTDLLDKFSNISEGLSNYSIIDKLVNIVDDLVECVKENSSKDLKKSFKSPEPRLFTPEEFFRIFNRSIDAFKDFVVASETSDCVVSSTLSPEKDSRVSVTKPFMLPPVAASSLRNDSSSSNRKAKNPPGDSSLHWAAMALPALFSLIIGFAFGALYWKKRQPSLTRAVENIQINEEDNEISMLQEKEREFQEV

SEQ ID NO: 147 - protein, 353 aa, Homo sapiens
  Thrombopoietin Accession No. P40225
MELTELLLVVMLLLTARLTLSSPAPPACDLRVLSKLLRDSHVLHSRLSQCPEVHPLPTPVLLPAVDFSLGEWKTQMEETKAQDILGAVTLLLEGVMAARGQLGPTCLSSLLGQLSGQVRLLLGALQSLLGTQLPPQGRTTAHKDPNAIFLSFQHLLRGKVRFLMLVGGSTLCVRRAPPTTAVPSRTSLVLTLNELPNRTSGLLETNFTASARTTGSGLLKWQQGFRAKIPGLLNQTSRSLDQIPGYLNRIHELLNGTRGLFPGPSRRTLGAPDISSGTSDTGSLPPNLQPGYSPSPTHPPTGQYTLFPLPPTLPTPVVQLHPLLPDPSAPTPTPTSPLLNTSYTHSQNLSQEG

SEQ ID NO: 148 - protein, 415 aa, Homo sapiens
  Thyroid Binding Globulin Accession No. P05543
MSPFLYLVLLVLGLHATIHCASPEGKVTACHSSQPNATLYKMSSINADFAFNLYRRFTVETPDKNIFFSPVSISAALVMLSFGACCSTQTEIVETLGFNLTDTPMVEIQHGFQHLICSLNFPKKELELQIGNALFIGKHLKPLAKFLNDVKTLYETEVFSTDFSNISAAKQEINSHVEMQTKGKVVGLIQDLKPNTIMVLVNYIHFKAQWANPFDPSKTEDSSSFLIDKTTTVQVPMMHQMEQYYHLVDMELNCTVLQMDYSKNALALFVLPKEGQMESVEAAMSSKTLKKWNRLLQKGWVDLFVPKFSISATYDLGATLLKMGIQHAYSENADFSGLTEDNGLKLSNAAHKAVLHIGEKGTEAAAVPEVELSDQPENTFLHPIIQIDRSFMLLILERSTRSILFLGKVVNPTEA

SEQ ID NO: 149 - protein, 116 aa, Homo sapiens
  Thyroid Stimulating Hormone Alpha Accession No. P01215
MDYYRKYAAIFLVTLSVFLHVLHSAPDVQDCPECTLQENPFFSQPGAPILQCMGCCFSRAYPTPLRSKKTMLVQKNVTSESTCCVAKSYNRVTVMGGFKVENHTACHCSTCYYHKS

SEQ ID NO: 150 - protein, 138 aa, Homo sapiens
  Thyroid Stimulating Hormone Beta Accession No. P01222
MTALFLMSMLFGLACGQAMSFCIPTEYTMHIERRECAYCLTINTTICAGYCMTRDINGKLFLPKYALSQDVCTYRDFIYRTVEIPGCPLHVAPYFSYPVALSCKCGKCNTDYSDCIHEAIKTNYCTKPQKSYLVGFSV

SEQ ID NO: 151 - protein, 295 aa, Homo sapiens
  Tissue Factor Accession No. P13726
METPAWPRVPRPETAVARTLLLGWVFAQVAGASGTTNTVAAYNLTWKSTNFKTILEWEPKPVNQVYTVQISTKSGDWKSKCFYTTDTECDLTDEIVKDVKQTYLARVFSYPAGNVESTGSAGEPLYENSPEFTPYLETNLGQPTIQSFEQVGTKVNVTVEDERTLVRRNNTFLSLRDVFGKDLIYTLYYWKSSSSGKKTAKTNTNEFLIDVDKGENYCFSVQAVIPSRTVNRKSTDSPVECMGQEKGEFREIFYIIGAVVFVVIILVIILAISLHKCRKAGVGQSWKENSPLNVS

SEQ ID NO: 152 - protein, 207 aa, Homo sapiens
  TIMP-1 Accession No. P01033
MAPFEPLASGILLLLWLIAPSRACTCVPPHPQTAFCNSDLVIRAKFVGTPEVNQTTLYQRYEIKMTKMYKGFQALGDAADIRFVYTPAMESVCGYFHRSHNRSEEFLIAGKLQDGLLHITTCSFVAPWNSLSLAQRRGFTKTYTVGCEECTVFPCLSIPCKLQSGTHCLWTDQLLQGSEKGFQSRHLACLPREPGLCTWQSLRSQIA

SEQ ID NO: 153 - protein, 233 aa, Homo sapiens
  Tumor Necrosis Factor-alpha Accession No. P01375
MSTESMIRDVELAEEALPKKTGGPQGSRRCLFLSLFSFLIVAGATTLFCLLHFGVIGPQREEFPRDLSLISPLAQAVRSSSRTPSDKPVAHVVANPQAEGQLQWLNRRANALLANGVELRDNQLVVPSEGLYLIYSQVLFKGQGCPSTHVLLTHTISRIAVSYQTKVNLLSAIKSPCQRETPEGAEAKPWYEPIYLGGVFQLEKGDRLSAEINRPDYLDFAESGQVYFGIIAL

SEQ ID NO: 154 - protein, 205 aa, Homo sapiens
  Tumor Necrosis Factor-beta Accession No. P01374
MTPPERLFLPRVCGTTLHLLLLGLLLVLLPGAQGLPGVGLTPSAAQTARQHPKMHLAHSTLKPAAHLIGDPSKQNSLLWRANTDRAFLQDGFSLSNNSLLVPTSGIYFVYSQVVFSGKAYSPKATSSPLYLAHEVQLFSSQYPFHVPLLSSQKMVYPGLQEPWLHSMYHGAAFQLTQGDQLSTHTDGIPHLVLSPSTVFFGAFAL

SEQ ID NO: 155 - protein, 283 aa, Homo sapiens
  Tumor Necrosis Factor RII Accession No. Q92956
MEPPGDWGPPPWRSTPKTDVLRLVLYLTFLGAPCYAPALPSCKEDEYPVGSECCPKCSPGYRVKEACGELTGTVCEPCPPGTYIAHLNGLSKCLQCQMCDPAMGLRASRNCSRTENAVCGCSPGHFCIVQDGDHCAACRAYATSSPGQRVQKGGTESQDTLCQNCPPGTFSPNGTLEECQHQTKCSWLVTKAGAGTSSSHWVWWFLSGSLVIVIVCSTVGLIICVKRRKPRGDVVKVIVSVQRKRQEAEGEATVIEALQAPPDVTTVAVEETIPSFTGRSPNH

SEQ ID NO: 156 - protein, 739 aa, Homo sapiens
  VCAM-1 Accession No. P19320
MPGKMVVILGASNILWIMFAASQAFKIETTPESRYLAQIGDSVSLTCSTTGCESPFFSWRTQIDSPLNGKVTNEGTTSTLTMNPVSFGNEHSYLCTATCESRKLEKGIQVEIYSFPKDPEIHLSGPLEAGKPITVKCSVADVYPFDRLEIDLLKGDHLMKSQEFLEDADRKSLETKSLEVTFTPVIEDIGKVLVCRAKLHIDEMDSVPTVRQAVKELQVYISPKNTVISVNPSTKLQEGGSVTMTCSSEGLPAPEIFWSKKLDNGNLQHLSGNATLTLIAMRMEDSGIYVCEGVNLIGKNRKEVELIVQEKPFTVEISPGPRIAAQIGDSVMLTCSVMGCESPSFSWRTQIDSPLSGKVRSEGTNSTLTLSPVSFENEHSYLCTVTCGHKKLEKGIQVELYSFPRDPEIEMSGGLVNGSSVTVSCKVPSVYPLDRLEIELLKGETILENIEFLEDTDMKSLENKSLEMTFIPTIEDTGKALVCQAKLHIDDMEFEPKQRQSTQTLYVNVAPRDTTVLVSPSSILEEGSSVNMTCLSQGFPAPKILWSRQLPNGELQPLSENATLTLISTKMEDSGVYLCEGINQAGRSRKEVELIIQVTPKDIKLTAFPSESVKEGDTVIISCTCGNVPETWIILKKKAETGDTVLKSIDGAYTIRKAQLKDAGVYECESKNKVGSQLRSLTLDVQGRENNKDYFSPELLVLYFASSLIIPAIGMIIYFARKANMKGSYSLVEAQKSKV

SEQ ID NO: 157 - protein, 232 aa, Homo sapiens
  VEGF Accession No. P15692
MNFLLSWVHWSLALLLYLHHAKWSQAAPMAEGGGQNHHEVVKFMDVYQRSYCHPIETLVDIFQEYPDEIEYIFKPSCVPLMRCGGCCNDEGLECVPTEESNITMQIMRIKPHQGQHIGEMSFLQHNKCECRPKKDRARQEKKSVRGKGKGQKRKRKKSRYKSWSVYVGARCCLMPWSLPGPHPCGPCSERRKHLFVQDPQTCKCSCKNTDSRCKARQLELNERTCRCDKPRR

SEQ ID NO: 158 - protein, 2813 aa, Homo sapiens
  von Willebrand Factor Accession No. P04275
MIPARFAGVLLALALILPGTLCAEGTRGRSSTARCSLFGSDFVNTFDGSMYSFAGYCSYLLAGGCQKRSFSIIGDFQNGKRVSLSVYLGEFFDIHLFVNGTVTQGDQRVSMPYASKGLYLETEAGYYKLSGEAYGFVARIDGSGNFQVLLSDRYFNKTCGLCGNFNIFAEDDFMTQEGTLTSDPYDFANSWALSSGEQWCERASPPSSSCNISSGEMQKGLWEQCQLLKSTSVFARCHPLVDPEPFVALCEKTLCECAGGLECACPALLEYARTCAQEGMVLYGWTDHSACSPVCPAGMEYRQCVSPCARTCQSLHINEMCQERCVDGCSCPEGQLLDEGLCVESTECPCVHSGKRYPPGTSLSRDCNTCICRNSQWICSNEECPGECLVTGQSHFKSFDNRYFTFSGICQYLLARDCQDHSFSIVIETVQCADDRDAVCTRSVTVRLPGLHNSLVKLKHGAGVAMDGQDIQLPLLKGDLRIQHTVTASVRLSYGEDLQMDWDGRGRLLVKLSPVYAGKTCGLCGNYNGNQGDDFLTPSGLAEPRVEDFGNAWKLHGDCQDLQKQHSDPCALNPRMTRFSEEACAVLTSPTFEACHRAVSPLPYLRNCRYDVCSCSDGRECLCGALASYAAACAGRGVRVAWREPGRCELNCPKGQVYLQCGTPCNLTCRSLSYPDEECNEACLEGCFCPPGLYMDERGDCVPKAQCPCYYDGEIFQPEDIFSDHHTMCYCEDGFMHCTMSGVPGSLLPDAVLSSPLSHRSKRSLSCRPPMVKLVCPADNLRAEGLECTKTCQNYDLECMSMGCVSGCLCPPGMVRHENRCVALERCPCFHQGKEYAPGETVKIGCNTCVCRDRKWNCTDHVCDATCSTIGMAHYLTFDGLKYLFPGECQYVLVQDYCGSNPGTFRILVGNKGCSHPSVKCKKRVTILVEGGEIELFDGEVNVKRPMKDETHFEVVESGRYIILLLGKALSVVWDRHLSISVVLKQTYQEKVCGLCGNFDGIQNNDLTSSNLQVEEDPVDFGNSWKVSSQCADTRKVPLDSSPATCHNNIMKQTMVDSSCRILTSDVFQDCNKLVDPEPYLDVCIYDTCSCESIGDCACFCDTIAAYAHVCAQHGKVVTWRTATLCPQSCEERNLRENGYECEWRYNSCAPACQVTCQHPEPLACPVQCVEGCHAHCPPGKILDELLQTCVDPEDCPVCEVAGRRFASGKKVTLNPSDPEHCQICHCDVVNLTCEACQEPGGLVVPPTDAPVSPTTLYVEDISEPPLHDFYCSRLLDLVFLLDGSSRLSEAEFEVLKAFVVDMMERLRISQKWVRVAVVEYHDGSHAYIGLKDRKRPSELRRIASQVKYAGSQVASTSEVLKYTLFQIFSKIDRPEASRIALLLMASQEPQRMSRNFVRYVQGLKKKKVIVIPVGIGPHANLKQIRLIEKQAPENKAFVLSSVDELEQQRDEIVSYLCDLAPEAPPPTLPPHMAQVTVGPGLLGVSTLGPKRNSMVLDVAFVLEGSDKIGEADFNRSKEFMEEVIQRMDVGQDSIHVTVLQYSYMVTVEYPFSEAQSKGDILQRVREIRYQGGNRTNTGLALRYLSDHSFLVSQGDREQAPNLVYMVTGNPASDEIKRLPGDIQVVPIGVGPNANVQELERIGWPNAPILIQDFETLPREAPDLVLQRCCSGEGLQIPTLSPAPDCSQPLDVILLLDGSSSFPASYFDEMKSFAKAFISKANIGPRLTQVSVLQYGSITTIDVPWNVVPEKAHLLSLVDVMQREGGPSQIGDALGFAVRYLTSEMHGARPGASKAVVILVTDVSVDSVDAAADAARSNRVTVFPIGIGDRYDAAQLRILAGPAGDSNVVKLQRIEDLPTMVTLGNSFLHKLCSGFVRICMDEDGNEKRPGDVWTLPDQCHTVTCQPDGQTLLKSHRVNCDRGLRPSCPNSQSPVKVEETCGCRWTCPCVCTGSSTRHIVTFDGQNFKLTGSCSYVLFQNKEQDLEVILHNGACSPGARQGCMKSIEVKHSALSVELHSDMEVTVNGRLVSVPYVGGNMEVNVYGAIMHEVRFNHLGHIFTFTPQNNEFQLQLSPKTFASKTYGLCGICDENGANDFMLRDGTVTTDWKTLVQEWTVQRPGQTCQPILEEQCLVPDSSHCQVLLLPLFAECHKVLAPATFYAICQQDSCHQEQVCEVIASYAHLCRTNGVCVDWRTPDFCAMSCPPSLVYNHCEHGCPRHCDGNVSSCGDHPSEGCFCPPDKVMLEGSCVPEEACTQCIGEDGVQHQFLEAWVPDHQPCQICTCLSGRKVNCTTQPCPTAKAPTCGLCEVARLRQNADQCCPEYECVCDPVSCDLPPVPHCERGLQPTLTNPGECRPNFTCACRKEECKRVSPPSCPPHRLPTLRKTQCCDEYECACNCVNSTVSCPLGYLASTATNDCGCTTTTCLPDKVCVHRSTIYPVGQFWEEGCDVCTCTDMEDAVMGLRVAQCSQKPCEDSCRSGFTYVLHEGECCGRCLPSACEVVTGSPRGDSQSSWKSVGSQWASPENPCLINECVRVKEEVFIQQRNVSCPQLEVPVCPSGFQLSCKTSACCPSCRCERMEACMLNGTVIGPGKTVMIDVCTTCRCMVQVGVISGFKLECRKTTCNPCPLGYKEENNTGECCGRCLPTACTIQLRGGQIMTLKRDETLQDGCDTHFCKVNERGEYFWEKRVTGCPPFDEHKCLAEGGKIMKIPGTCCDTCEEPECNDITARLQYVKVGSCKSEVEVDIHYCQGKCASKAMYSIDINDVQDQCSCCSPTRTEPMQVALHCTNGSVVYHEVLNAMECKCSPRKCSK

SEQ ID NO: 159 - DNA, 777 bp, Vaccinia virus
  VACGL001
atgaaacaatatatcgtcctggcatgcatgtgcctggcggcagctgctatgcctgccagtcttcagcaatcatcctcatcctcctcctcgtgtacggaagaagaaaacaaacatcatatgggaatcgatgttattatcaaagtcacaaagcaagaccaaacaccgaccaatgataagatttgccaatccgtaacggaaattacagagtccgagtcagatccagatcccgaggtggaatcagaagatgattccacatcagtcgaggatgtagatcctcctaccacttattactccatcatcggtggaggtctgagaatgaactttggattcaccaaatgtcctcagattaaatccatctcagaatccgctgatggaaacacagtgaatgctagattgtccagcgtgtccccaggacaaggtaaggactctcccgcgatcactcatgaagaagctcttgctatgatcaaagactgtgaagtgtctatcgacatcagatgtagcgaagaagagaaagacagcgacatcaagacccatccagtactcgggtctaacatctctcataagaaagtgagttacgaagatatcatcggttcaacgatcgtcgatacaaaatgcgtcaagaatctagagtttagcgttcgtatcggagacatgtgcaaggaatcatctgaacttgaggtcaaggatggattcaagtatgtcgacggatcggcatctgaaggtgcaaccgatgatacttcactcatcgattcaacaaaactcaaagcgtgtgtctga

SEQ ID NO: 160 - DNA, 192 bp, Vaccinia virus
  VACGL003
atgccgcattcggagacagtaactctagtgggcgacatctatatactatatagtaataccaatactcaagactacgaaactgatacaatctcttatcatgtgggtaatgttctcgatgtcgatagccatatgcccggtagttgcgatatacataaactgatcactaattccaaacccacccactttttatag

SEQ ID NO: 161 - DNA, 369 bp, Vaccinia virus
  VACGL004
atgaagtccgtattatactcgtatatattgtttctctcatgtataataataaacggaagagatatagcaccgcatgcaccatccgatggaaagtgtaaagacaacgaatacaaacgccataatttgtgtccgggaacatacgcttccagattatgcgatagcaagactaacacacgatgtacgccgtgtggttcgggtaccttcacatctcgcaataatcatttacccgcttgtctaagttgtaacggaagacgcgatcgtgtaacacgactcacaatagaatctgtgaatgctctcccggatattattgtcttctcaaaggatcatccggatgcaaggcatgtgtttcccaaacaaaatgtggaatag

SEQ ID NO: 162 - DNA, 159 bp, Vaccinia virus
  VACGL005
atgtcaataatatacaatttgcaaagcggttattggaatatggagcgagtatcacgctcgataatcaatacggccatccagaaaagcagttacagaagagaaaacaaaacgaaatcgttgttctacaagatgtctctccctacgacgattactacgtaa

SEQ ID NO: 163 - DNA, 150 bp, Vaccinia virus
  VACGL006
atgtacggtctgatattatcgagatttaataattgcgggtatcactgttatgaaaccatactgatagatgtatttgatatactaagcaagtacatggatgatatagatatgatcgataactctactatattacgcggtcgatgtcaataa

SEQ ID NO: 164 - DNA, 966 bp, Vaccinia virus
  VACGL007
atgcgctacattgttacgtctccaataaatgcgatacagacattaagattgttctctcgcggagtcgagagactttgtagaaacaacgaaggattaactccgctaggagtatacagtaagcatagatacgtaaaatctcagattgtgcatctactgatatccagctattcaaattcctctaacgaactcaagtcgaatataaatgatttcgatctgtattcggataatatcgacttacgtctgctaaaatacctaattgtggataaacggatacgtccgtccaagaatacgaattatgcaatcaatggtctcggattggtggatatatacgtaacgacgcctaatccgagaccagaagtattgctatggcttcttaaatcagaatgttacagcaccggttacgtatttcgtacctgtatgtacgacagtgatatgtgtaagaactctcttcattactatatatcgtctcatagagaatctcaatctctatccaaggatgtaattaaatgtttgatcgataacaatgtttccatccatggcagagacgaaggaggatctttacccatccaatactactggtctttctcaaccatagatatagagattgttaaattattattaataaaggatgtggacacgtgtagagtatacgacgtcagccctatattagaggcgtattatctaaacaagcgatttagagtaaccccatataatgtagacatggaaatcgttaatcttcttattgagagacgtcatactcttgtcgacgtaatgcgtagtattacttcgtacgattccagagaatataaccactacatcatcgataacattctaaagagatttagacaacaggatgaatccatcgtacaagccatactgataaactacttacattacggcgatatggtcgttcgatgcatgttagataacggacaacaactatcctctacacgactactttgttaa

SEQ ID NO: 165 - DNA, 261 bp, Vaccinia virus
  VACGL008
atgaggaatgattgccttcgtgaaataggaataattagcaccagaatagctatggattattgtggtagagagtgcactattctatgtcgtctactggatgaagatgtgacgtacaaaaaaataaaactagaaattgaaacgtgtcacaacttatcaaaacatatagatagacgaggaaacaatgcgctacattgttacgtctccaataaatgcgatacagacattaagattgttctctcgcggagtcgagagactttgtag

SEQ ID NO: 166 - DNA, 1065 bp, Vaccinia virus
  VACGL009
atggatatctttaaagaactaatcttaaaacaccctgatgaaaatgttttgatttctccagtttccattttatctactttatctattctaaatcatggagcagctggttctacagctgaacaactatcaaaatatatagagaatatgaatgagaatacacccgatgacaataatgatgacatggaggtagatattccgtattgtgcgacactagctaccgcaaataaaatatacggtagcgatagtatcgagttccacgcctccttcctacaaaaaataaaagacgattttcaaactgtaaactttaataatgctaaccaaacaaaggaactaatcaacgaatgggttaagacaatgacaaatggtaaaattaattccttattgactagtccgctatccattaatactcgtatgacagttgttagcgccgtccattttaaagcaatgtggaaatatccattttctaaacatcttacatatacagacaagttttatatttctaagaatatagttaccagcgttgatatgatggtgggtaccgagaataacttgcaatatgtacatattaatgaattattcggaggattctctattatcgatattccatacgagggaaactctagtatggtaattatactaccggacgacatagaaggtatatataacatagaaaaaaatataacagatgaaaaatttaaaaaatggtgtggtatgttatctactaaaagtatagacttgtatatgccaaagtttaaagtggaaatgacagaaccgtataatctggtaccgattttagaaaatttaggacttactaatatattcggatattatgcagattttagcaagatgtgtaatgaaactatcactgtagaaaaatttctacatacgacgtttatagatgttaatgaggagtatacagaagcatcggccgttacaggagtatttacgattaacttttcgatggtatatcgtacgaaggtctacataaaccatccattcatgtacatgattaaagacaccacaggacgtatactttttatagggaaatactgctatccgcaataa

SEQ ID NO: 167 - DNA, 417 bp, Vaccinia virus
  VACGL010
atgttgataaattatctgatgttgttgttcgctgctatgataatcagatcattcgccgatagtggtaacgctatcgaaacgacattgccagaaattacaaacgctacaacagatattccagctatcagattatgcggtccagagggagatggatattgtttacacggtgactgtatccacgctagagatattgacggtatgtattgtagatgctctcatggttatacaggcattagatgtcagcatgtagtattagtagactatcaacgttcagaaaacccaaacactacaacgtcatatatcccatctcccggtattatgcttgtattagtaggcattattatgtgttgtctattatctgtttataggttcactcgacgaactaaactacctatacaagatatggttgtgccataa

SEQ ID NO: 168 - DNA, 996 bp, Vaccinia virus
  VACGL011
atggatatttacgacgataaaggtctacagactattaaactgtttaataatgaatttgattgtataaggaatgacatcagagaattatttaaacatgtaactgattccgatagtatacaacttccgatggaagacaattctgatattatagaaaatatcagaaaaatactatatagacgattaaaaaatgtagaatgtgttgacatcgataacacaataacttttatgaaatacgatccaaatgatgataataagcgtacgtgttctaattgggtacccttaactaataactatatggaatattgtctagtaatatatttggaaacaccgatatgtggaggcaaaataaaattataccaccctacaggaaatataaagtcggataaggatattatgtttgcaaagactctagactttaaatcaacgaaagtgttaactggacgtaaaacaattgccgttctagacatatccgtttcatataatagatcaatgactactattcactacaacgacgacgttgatatagatatacatactgataaaaatggaaaagagttatgttattgttatataacaatagatgatcattacttggttgatgtggaaactataggagttatagtcaatagatctggaaaatgtctgttagtaaataaccatctaggtataggtatcgttaaagataaacgtataagcgatagttttggagatgtatgtatggatacaatatttgacttttctgaagcacgagagttattttcattaactaatgatgataacaggaatatagcatgggacactgataaactagacgatgatacagatatatggactcccgtcacagaagatgattacaaatttctttctagactagtattgtatgcaaaatctcaatcggatactgtatttgactattatgttcttactggtgatacggaaccacccactgtattcattttcaaggtaactagattttactttaatatgccgaaataa

SEQ ID NO: 169 - DNA, 252 bp, Vaccinia virus
  VACGL013
atgcattatccgaaatattatatcaatatcacaaaaataaatacacatttggctaatcaatttcgggcttggaaaaaacgtatcgccggaagggactatatgactaacttatctagagatacaggaatacaacaatcaaaacttactgaaactatacgtaactgtcaaaaaaatagaaacatatatggtctatatatacactacaatttagttattaattggataaccgatgtgattatcaatcaatattaa

SEQ ID NO: 170 - DNA, 189 bp, Vaccinia virus
  VACGL014
atgaagttgtttactcaaaacgatagatactttggtttattggattcgtgtactcatatattttgcataacatgcatcaatatatggcatagaacacgaagagaaaccggtgcgtcggataattgtcctatatgccgtacccgttttagaaacataacaatgagcaagttctataagctagttaactaa

SEQ ID NO: 171 - DNA, 375 bp, Vaccinia virus
  VACGL015
atgagaatcctatttctcatcgctttcatgtatgggtgtgttcactcatatgttaacgcggttgaaaccaaatgtccaaatctagacattgtaacatcttctggagaatttcattgttcaggatgtgtggaacatatgcctgagtttagctatatgtattggttggcaaaggatatgaaatcggacgaggataccaagtttatagaacatctgggtgatggcatcaaagaagatgaaaccgttcgtaccacagatagtggaatcgtcactctacgtaaagtccttcatgtgactgatactaataaatttgataattataggttcacttgtgtcctcgctacgctagatggcatttataaaaagaatgtttgctga

SEQ ID NO: 172 - DNA, 273 bp, Vaccinia virus
  VACGL016
atgaaaaaaataatggtaggtggtaatactatgttctcattaatatttactgatcatggagctaaaattattcatagatatgccaataatccagaattacgtgagtattatgagttaaaacaaaataaaatatatgtggaagcatatgatattatttccaacgcaatagtgaaacatgatagaatacataaaaccatagaatcagttgatgataatacctacatttctaatcttccgtataccatcaaatacaaaatattcgagcaacaataa

SEQ ID NO: 173 - DNA, 540 bp, Vaccinia virus
  VACGL017
atgccatcaattatctcgatgatggagagatcccgattggacacctatgtaaatccaactatggatgttataatttttacacttatacatacaaaaaagggtctttgtgacatgtcttatgcttgcccaattcttagtactataaacatttgcctaccttatcttaaagacattaacatgattgacaaacgaggagaaacacttcttcacaaggctgttagatataataaacaatctctagtatctttactgctagaatccggttcagatgtcaacattagatcaaataacggatatacatgtatagccattgccatcaacgaatctaaaaacattgaactgctgaaaatgctattatgtcataaacctacattagattgtgtgattgattcattgagagaaatatctaacatcgtagataacgactatgctataaaacaatgtattaaatatgccatgattatagatgactgtacatcgtctaagattccagagtccataagtcaacgctataatgattatatagatctttgcaattaa

SEQ ID NO: 174 - DNA, 414 bp, Vaccinia virus
  VACGL018
atgaaaggaatagataacactgcttattcatatatagacgatctaacatgttgcactcgaggaattatggctgattatctaaatagtgattatagatacaataaagatgtagatttagatttggtcaaattgtttttggaaaatggaaagccgcacggaataatgtgtagtattgtaccactatggagaaatgataaggaaaccatctctttgatattgaaaacaatgaactcggatgtcctccaacatatactaattgagtatatgacattcggcgatatccctctagtggaatatggagctgtggtaaataaagaggctatacacggatactttagaaatattaatattgattcttacacgatgaaatatctactaaaaaaggaagggagatgccatcaattatctcgatga

SEQ ID NO: 175 - DNA, 474 bp, Vaccinia virus
  VACGL019
atgtttgactatttggaaaatgaggaggtggctcttgatgaacttaaacagatgttgaaagacagagatcctaatgataccaggaaccaattcaagaataatgctttacacgcatacctttttaatgagcattgtaataatgtcgaggtcgtcaaactactactagacagtggcactaatccattacgcaaaaattggagacagcttaccccattagaagaatacacaaatagtagacatgttaaagttaataaggatatagcgatggctctactagaagccactggatttagcaacataaataactttaatatattcagctatatgaaatccaaaaatgtagacgttgacttgataaaggtgttggtagaacatggatttgacttgagtgttaaatgtgaaaaccatcgttcagttatagaaaattatgtaatgacaatgatcctgtttctaaaattattgatttgttcatag

SEQ ID NO: 176 - DNA, 180 bp, Vaccinia virus
  VACGL020
atgtcttctaaagggggtagtggcggcatgtggagtgtctttatccatggacatgatggtagtaataaaggatctaaaacttatacatctggtggcggtggaatgtggggaggaggatcgtccagtggggttaatggaggtattaacggaggtgtaaaatctggaactggtaaaatttaa

SEQ ID NO: 177 - DNA, 1905 bp, Vaccinia virus
  VACGL021
atggttaacgataagatactctatgatagttgtaaaacatttaacatcgatgccagcagtgcacaatcattgatagaaagtggtgcaaatccattatatgagtatgatggtgaaactccattaaaggcatacgttaccaagaaaaataataatatcaaaaacgatgttgtgattttgttattgtcgtcagtcgactataaaaatatcaatgattttgatatattcgaatatctatgttctgataacatcaatatagacttattgaaattactaatttcgaaaggtatagaaataaatagtatcaaaaatggtattaatattgtagaaaaatacgctacaacatcaaatcccaatgtagatgtgtttaaactattattggataaaggaatacctacatgtagcaacatacagtatggatacaagatcaaaatagaacagattagacgtgctggtgaatattataattgggatgatgaattagacgattacgattacgactacaccactgattatgatgatagaatgggtaaaacagttctctattattatattattactaggtcacaagatggttatgctacatctttggacgtaataaactatttaatttcacacgaaaaagagatgcgttattatacttatcgtgaacataccacactctattattatcttgacaaatgcgatattaaacgggaaatatttgacgcgttattcgatagtaactatagtggtcatgaactaatgaatattctatctaactatttacgtaaacagtttaggaagaaaaatcacaaaatcgataattatatagttgatcaactattattcgaccgtgatacgttttatattttagaattgtgtaatagtttatgtaataatatcctaatatccacaattcttaaaagatatacagattctatacaagatctattgttagaatatgtatcttatcatacagtatacatcaatgttattaaatgtatgattgatgaaggagctacattatatagatttaagcatataaataaatattttcaaaaatttggcaatagagatcctaaagttgtcgagtatattttaaaaaatggaaacttagttgtagataatgacaatgatgataacctaataaatattatgccattattccctaccttctctatgcgtgagttggatgtgttatcgatactaaaactttgtaagccgtatattgatgatataaacaaaatagataaacatggatgtagtatactttatcattgtattgagtcgcatagtgtcagcctagtagaatggttaatagataatggcgcagacattaatataataacaaaatatgggtttacatgtattactatttgtgttatactggcagataaatatatcccagaaatagcagaattatatattaagatattggaaattattctgagtaaattaccaaccatcgaatgtattaagaaaacagttgattacctagacgatcacaggtacttattcataggtggtaataataaatcgttactgaaaatatgtatcaagtacttcatattagtcgattataagtacacatgtagcatgtatccatcatatatagaatttataaccgactgcgaaaaagaaattgcggatatgcgtcaaattaaaataaatggtaaggacatgcttacagtgatgtacatgttaaataaacctacaaagaaacgatatgttaataatccgatatttacagattgggctaataagcaatataagttttataatcaaataatatataatgctaataagttaatagaacaaagtaagaaaatagacgacatgatagaggaggtatccgcggataacaatcgtttatcaacactaccgttagaaattagacatttgattttctcgtacgcgttcctataa

SEQ ID NO: 178 - DNA, 534 bp, Vaccinia virus
  VACGL023
atgtccgcaattagatttattgcgtgtttatgtcttatttccatcttcggaaattgtcacgaggatccatattatcaaccatttaataaattaaacattactctagatatatacacttatgaggatctagtaccatacaccgtagacaatgacacaacttctttcgttaagatatactttaaaaatttttggattacggttatgactaaatggtgtgctccgtttattgataccgttagcgtatacacatcgcatgataatctgaatatacaattttatagtagggacgaatatgatacacaaagcgaggataaaatttgtaccattgacgttaaagcacgatgcaaccatctaacaaaaccagaagttacagtacaacaagaagcctacagatattcattatcttctgacctatcgtgttttgattctatagatctagagattgatcttattgaaactaatagtactgacactacagtactgaaatcatatgagctcatgcttcccaaacgtgctaaatccatacataactga

SEQ ID NO: 179 - DNA, 453 bp, Vaccinia virus
  VACGL025
atgggtatacagcacgaattcgacatcattattaatggagatatcgcgttgagaaatttacagttacataaaggggataactacggatgcaaactaaaaattatttcgaatgattacaagcaattaaagtttagattcattatacgcccagattggtcggaaatcgacgaggtcaaaggattaaccgtatttgcaaacaactatgcggtgaaagttaataaggtagatgacacgttctattacgtaatatatgaggctgtaatacatctgtataacaaaaaaacagagatattgatttattctgatgatgagaacgagctcttcaaacactattacccatacatcagtctaaatatgattagtaaaaagtataaagttaaagaagagaactactcatccccgtatatagaacatccgttaatcccgtatagagattatgagtccatggattaa

SEQ ID NO: 180 - DNA, 456 bp, Vaccinia virus
  VACGL026
atgaatgcgtataataaagccgattcgttttctttagagtctgattctatcaaagatgttatacacgattatatttgttggctcagtatgactgatgaaatgagaccatctatcggaaacgtctttaaagcgatggaaacgtttaagatagacgcggttagatattacgatggtaacatatacgatttagctaaagatataaatgcgatgtcattcgacagttttataagatctctacaaaatatctcttcaaagaaagataaactcactgtttatggaaccatgggactgctgtctattgtcgtagatattaacaaaggttgtgatatatccaatatcaagttcgctgccggaataatcattttaatggagtatatatttgatgacacggatctgtcgcatcttaaagtagcactctatcgtagaatacagagacgtgatgatgtagatagataa

SEQ ID NO: 181 - DNA, 615 bp, Vaccinia virus
  VACGL027
atggcgtatatgaacagatcagatctcgataaactaaaacacgaaaatatcttttctgggaatattatagaggacgccaaagagttcgtctttggatctagaaaaatatatactgattctgttgatgatctaatagaattatatagtttagccaaatatcttaacaacgaaaatcttaaagatgtagtgattgagagaatggattatgtgtgcaaatatatcggtaaagataattggagtactatatattcgttttataaagaaaatggtctacgtaatagttttctacgacaatacatcaacaataatatagaagagatatgtaacacagaccaatttctaaaattggatgtagattcagtatgtgatattctagacaacgatgagatcgtagtaactagagaatatactatcttaaacatggtattacgatggctagaaaataaaagagttaatatagacgactttactaaagttatgttcgttattcgatttaaatttataacatattctgaactcactaatgcgatagagaaaatagctccagaatacagacaatgcttacaggatctataccatatgaaaattacgcgtcctagacactttgataactag

SEQ ID NO: 182 - DNA, 951 bp, Vaccinia virus
  VACGL028
atggatactattaaaatatttaatcatggagagtttgatactattagaaatgaattggtcaacttgttaaaagttgtaaaatggaacaccattaattcaaatgtaacggtatcgtctaccgacacaatagatatatctgattgtatcagagagatattatacaaacagtttaaaaatgtacgaaatatagaggtgagcagtgatatatctttcataaaatataatagatttaatgatactactctaacagatgataatgtgggatattatttagtgatttatttgaatcggacgaaatctgtaaagactttaatatatcctactccagaaacagtgataacatcatccgaggatataatgttttctaaatctcttaactttagattcgagaatgtaaagcgcgactataaattggttatgtgttctatatctttgacatacaagccatctatatgcagaatccaatacgataacaataaatatttagatattagcgacagtcaagaatgtaataatatatgttactgcgtcataactatggatccccaccacttgatagatttagaaaccatatgtgtcttggtcgataaatcaggaaagtgtttgctagtaaacgagttttatattagatttaggaaaaatcacatctacaatagctttgccgatctatgcatggatcatatatttgaactaccgaatacaaaagaattattcactctgcgcaacgatgatggacgaaacatagcctgggataatgataagttggaaagtggtaataatacatggattcctaaaacagatgatgagtataagtttctatctaaattgatgaatattgcgaagtttaacaacaccaaatttgattactacgtgcttgttggagatacggatccgtgtactgtctttacgttcaaagtaacaaagtattacatcaatctcaattatgaatag

SEQ ID NO: 183 - DNA, 792 bp, Vaccinia virus
  VACGL029
atgaaggtggagagcgtgacgttcctgacattgttgggaataggatgcgttctatcatgctgtactattccgtcacgacccattaatatgaaatttaagaatagtgtggagactgatgctaatgctaattacaacataggagacactatagaatatctatgtctacctggatacagaaagcaaaaaatgggacctatatatgctaaatgtacaggtactggatggacactctttaatcaatgtattaaacggagatgcccatcgcctcgagatatcgataatggccaacttgatattggtggagtagactttggctctagtataacgtactcttgtaatagcggatatcagttgatcggtgaatctaaatcgtattgtgaattaggatctactggatctatggtatggaatcccgaggcacctatttgtgaatctgttaaatgccaatcccctccatctatatccaacggaagacataacggatacgaggatttttataccgatgggagcgttgtaacttatagttgcaatagtggatattcgttgattggtaactctagtgtcctgtgttcaggaggagaatggtccgatccacccacgtgtcagattgttaaatgtccacatcctacaatatcaaacggatacttgtctagcgggtttaaaagatcatactcatacaacgacaatgtagactttaagtgcaagtacggatataaactatctggttcctcatcatctacttgctctccaggaaatacatggaagccggaacttccaaaatgtgtacgctaa

SEQ ID NO: 184 - DNA, 210 bp, Vaccinia virus
  VACGL030
atgatagaacgcatcctattcccaacaatgtcaggaacgtcacgctctccaccttcatatttatttatccgtaaaaatgttatcctggacatcgtacaaataataaaaagcccatatatgttcgctattgtagaaattgtttttcacagttgctcaaaaacgatggcagtgacttatgagttacgttacactttggagtctcatctttag

SEQ ID NO: 185 - DNA, 1539 bp, Vaccinia virus
  VACGL031
atggaaagcgtaatattttctatcaatggggaaattatacaagtgaataaggaaattattacggcgtctccgtataatttttttaaacgcattcaggatcaccatctaaaggatgaagcgattatattgaatggtataaactatcacgcgtttgaatcgctattagactatatgcgctggaagaagataaacatcaccataaacaatgtagaaatgatactagttgctgccataataattgatgttccgcctgtagtagatctatgtgtaaaaactatgattcataatattaatttcacaaattgtataaggatgtttaacttttctaaaagatatggaattaaaaaactatataatgcgtcgatgtcagaaataatcaacaatattactgcggtgacatccgatccagaatttggaaaattatcaaaggatgaactgacaactatcttatcccacgaagacgttaacgtaaatcatgaggatgttacagctatgatattattaaagtggatacataaaaatccaaacgatgtagatatcatcaacattttacatcccaagtttatgactaatactatgcgcaatgctatatcattgttgggattaactatatccaaatctacaaagccagtgacacgaaatggtataaaacataatatagtagtcattaaaaactctgattatatatccacaataacccattactctcctagaacagaatattggacgatagtcggtaatacagatagacaattctataatgcaaatgttttacataattgtctatacattattggcggcatgattaacaatagacatgtttattccgtatcgcgggtagatcttaaaacgaaaaaatggaaaacggttactaatatgtcgtcgttaaaatcagaagttagtacttgtgttaacgatggaaagttatatgtaataggaggattagaattttctatttcaacgggtgtggcagaatatttgaaacacggcacttcgaaatggataagacttccaaacttaattactcctagatattcaggcgcgtcggtattcgtaaacgatgatatatatgtaatgggtggagtttataccacgtatgagaaatatgtagtattaaacgatgtggaatgtttcactaaaaatcgttggataaaaaagtctcccatgcctagacatcatagtatagtttatgctgtagagtacgacggcgacatctatgtaattactggaattactcacgagactcgtaattatctatacaaatatatagttaaggaagacaaatggatagaattgtacatgtactttaaccatgtaggaaagatgttcgtgtgttcttgcggtgattatatcttaattatagcagatgcaaaatacgaatattatccaaaatcaaatacttggaatttgttcgatatgtcaactcgtaatatcgaatattatgatatgtttactaaagatgagactccaaagtgtaacgtaactcataagtcactgccatcgtttttgagcaactgtgaaaaacaatttctacaatag

SEQ ID NO: 186 - DNA, 675 bp, Vaccinia virus
  VACGL032
atggtgaaaaataataaaataagtaatagctgccgaatgataatgagtactaaccctaataatattctaatgagacatctcaaaaatcttacagatgatgaatttaaatgtattattcatcgatcatctgattttctttatttgtccgatagtgactatactagtataaccaaagaaacattagttagtgagatcgtagaagaatatccggatgattgtaataaaatattagctattatatttttggtgttagataaagacatagatgtagatatagaaactaaactaaagcctaaacccgcagttagatttgccattctagacaagatgactgcggatattaaactaacggatctagtcagacattattttagatacatagaacaagatataccactaggtccgttgttcaaaaaaatagattcgtacagaacaagagccattaataagtattcgaaagagttaggattggctactgaatactttaataagtacggacatttaatgttttatactctccctataccatataacagattcttttgtagaaattcgataggctttttagcggttctatcgcctacgataggacacgtaaaagcattttataaattcatagaatacgtttctatagatgatagacggaaatttaaaaaggaattaatgtcaaaatga

SEQ ID NO: 187 - DNA, 354 bp, Vaccinia virus
  VACGL033
atgaggactctacttattagatatattctttggagaaatgacaacgatcaaacctattataatgatgattttaaaaagcttatgttgttggatgaattggtagatgacggcgatgtatgtacattgattaagaacatgagaatgacgctgtccgacggtccattgctagatagattaaatcaaccagttaataatatagaagacgctaagcgaatgatcgctattagtgccaaagtggctagagacattggtgaacgttcagaaattagatgggaagagtcattcaccatactctttaggatgattgaaacatattttgatgatctaatgattgatctatatggtgaaaaataa

SEQ ID NO: 188 - DNA, 528 bp, Vaccinia virus
  VACGL034
atgacgtcctctgcaatggataataatgaacctaaagtactagaaatggtatatgatgctacaattttacccgaaggtagtagcatggatccaaatatcatggattgtataaacagacacatcaatatgtgtatacaacgcacctatagttctagtataattgccattttggatagattcctaacaatgaacaaggatgaactaaataatacacagtgtcatataattaaagaatttatgacatacgaacaaatggcgattgaccattatggagaatatgtaaacgctattctatatcaaattcgtaaaagacctaatcaacatcacaccattgatctgtttaaaaaaataaaaagaacccggtatgacacttttaaagtggatcccgtagaattcgtaaaaaaagttatcggatttgtatctatcttgaacaaatataaaccggtttatagttacgtcctgtacgagaacgtcctgtacgatgagttcaaatgtttcattgactacgtggaaactaagtatttctaa

SEQ ID NO: 189 - DNA, 1410 bp, Vaccinia virus
  VACGL035
atgatatttgttatagagagtaaattgttgcaaatatacagaaatagaaatagaaatattaatttttatactacaatggacaacattatgtcggccgagtattatctatctctttatgccaaatataatagtaaaaatttagatgtatttaggaatatgctacaagctatcgaaccttctggaaataattatcacattctacatgcgtattgtggaattaaaggactagatgaacgatttgtcgaagaacttcttcatagaggatactctccaaatgagacggatgatgatggaaattatccattgcatatagcttctaaaattaataataatagaatagtcgcgatgctgctgacgcacggcgcagatccaaacgcgtgtgataaacagcataaaacacctctatattatctctcgggaacagatgatgaagtcatagagagaataaatttattggtacagtatggagccaagattaacaactcggttgatgaagaaggatgtggtccgttgttggcgtgtacagatccttcagaaagagtgtttaaaaaaataatgtccatcggattcgaagccaggatagtggataaatttggcaaaaatcatattcatagacatcttatgtcagacaatccaaaagcttctacaatctcatggatgatgaaactaggaattagtccctcaaaaccagatcatgatggaaatacacctctccatattgtatgctctaaaacagtcaagaatgtagacattatagatcttttacttccatcaacggatgttaataaacaaaacaaattcggagatagtcctcttacacttcttattaagacattgagcccagcgcatcttattaacaaattgctattgactagcaatgttattacggatcaaacagttaatatttgtatcttttatgatagagatgatgttctagaaattattaatgataaaggaaagcaatatgattttaagatggctgttgaagtgggatccataagatgcgtcaaatatctattagacaatgatataatttgtgaagatgccatgtactacgctgtactatctgaatacgaaacaatggtagactatctattgttcaatcattttagtgtagactctgtagttaacggtcatacatgtatgagcgaatgtgtaagactaaataacccagtcattttatcgaagctgatgttacataatcctacttctgagaccatgtatctaactatgaaagctatagaaaaagatagactagataaatctattattattccgtttatcgcgtactttgtacttatgcatccggacttttgtaaaaatcgtagatactttacttcatataaacgttttgtaactgattatgttcatgaaggagtatcttacgaagtattcgatgattatttttaa

SEQ ID NO: 190 - DNA, 663 bp, Vaccinia virus
  VACGL036
atggtttacaaattagtcttgctcttttgtatcgcatctctcgggtattcggtagaatacaagaatactatatgtcctcctcgacaagattaccggtattggtactttgccgccgaactcactattggtgtaaattacgacattaattctactattattggtgagtgtcatatgagtgaaagctatatcgacagaaatgctaacatagtgttgactggatacggactagaaataaacatgaccatcatggatacggatcagagatttgtggcagcggctgagggtgttggtaaagataataaactatctgttctgttgtttaccactcagcggctagataaagttcatcataatattagtgtgacaataacatgtatggaaatgaattgtggaaccacaaaatacgatagcgatcttccggaatcaattcataaatcatcatcgtgtgatataactataaatggatcatgtgtgacatgtgttaacttagagactgatccaacaaagattaatccccattacctacaccccaaggataaatatctttatcataattctgagtatggcatgcgtggtagttatggcgtgacatttatagatgaactaaaccagtgccttcttgacataaaaaaactaagttatgatatttgttatagagagtaa

SEQ ID NO: 191 - DNA, 855 bp, Vaccinia virus
  VACGL037
atggatctgtcacgaattaatacttggaagtctaagcagctgaaaagctttctctctagtaaagatacatttaaggcggatgtccatggacatagtgccttgtattatgcaatagctgataataacgtgcgtctagtatgtacgttgttgaacgctggagcattgaaaaatcttctagagaatgaatttccattacatcaggcagccacattggaagataccaaaatagtaaagattttgctattcagtggactggatgattcacaatttgatgacaagggaaacaccgcattgtattatgcggttgatagtggtaacatgcaaacggtaaaactgtttgttaagaaaaattggagactgatgttctatgggaaaactggatggaaaacttcattttatcatgccgtcatgcttaatgatgtaagtattgtttcctactttctttcagagataccatctacttttgatctggctattctccttagttgtattcacatcactataaaaaatggacacgtggatatgatgattctcttgctcgactatatgacgtcgacaaacaccaataattcccttctcttcattccggacattaaattggctatagataataaagacattgagatgttacaggctctgttcaaatacgacattaatatctattctgctaatctggaaaatgtactattggatgatgccgaaatagctaaaatgattatagaaaagcatgttgaatacaagtttgactcctatacaaaagatctcgatatcgtcaagaataataaattggatgaaataattagcaaaaacaaggaactcagactcatgtacgtcaattgtgtaaagaaaaactaa

SEQ ID NO: 192 - DNA, 1110 bp, Vaccinia virus
  VACGL038
atgattgcgttattgatactatcgttagcgtgttcagcgtccgcctatcgtctacaaggatttaccaatgccggtatagtagcgtataaaaatattcaagatgataatattgtcttctcaccgtttggttattcgttttctatgtttatgtcgctattgcctgcatcaggtaatactagaatagaattattgaagactatggatttgagaaaaagagatctgggtccagcatttacagaattaatatcaggattagctaagctgaaaacatctaaatatacgtacactgatctaacttatcaaagtttcgtagataatactgtgtgcattaaaccgtcgtattatcaacaatatcatagattcggcctatatagattaaactttagacgagatgcggttaataaaattaattctatagtagaacgtagatccggtatgtctaatgtagtagattctaatatgctcgacaataatactctatgggcaatcattaatactatatattttaaaggtatatggcaatatccgtttgatatcactaaaacacgcaatgctagttttactaataagtacggtacgaaaacggttcccatgatgaacgtagttactaaattgcaaggaaatacaatcacaatcgatgacaaagaatatgacatggtacgccttccgtataaggatgctaatattagtatgtacctggcaataggtgataatatgacccatttcacagattctatcacggctgcaaaattagactattggtcgtctcaattagggaataaagtgtacaatcttaaactccctaaattttctatcgaaaataagagggatattaagtcgatagccgaaatgatggctcctagtatgtttaatccagataatgcgtcgtttaaacatatgactagggacccattatatatttataaaatgtttcagaatgcaaagatagatgtcgacgaacaaggaactgtagcagaggcatctactattatggtagctacggcgagatcatctcctgaaaaactggaatttaatacaccatttgtgttcatcatcagacatgatattactggatttatattgtttatgggtaaggtggaatctccttaa

SEQ ID NO: 193 - DNA, 237 bp, Vaccinia virus
  VACGL041
atggtattaataattaaccttatttttatgttcggtataaaaaaattattgatgtctacacatccttttgtaattgacatctatatatccttttgtataatcaactctaatcactttaacttttacagttttccctaccagtttatccctatattcaacatatctatccatatgcatcttaacactctctgccaagatagcttcagagtgaggatagtcaaaaagataaatatatag

SEQ ID NO: 194 - DNA, 267 bp, Vaccinia virus
  VACGL042
atgcttgcattttgttattcgttgcccaatgcgggtgatgtaataaagggcagagtatacgagaatgattatgctctatatatttatctttttgactatcctcactctgaagctatcttggcagagagtgttaagatgcatatggatagatatgttgaatatagggataaactggtagggaaaactgtaaaagttaaagtgattagagttgattatacaaaaggatatatagatgtcaattacaaaaggatgtgtagacatcaataa

SEQ ID NO: 195 - DNA, 1275 bp, Vaccinia virus
  VACGL043
atgaatccggataatacaatcgcagtgattacagaaactattcctataggtatgcaatttgataaagtatatttgtctacatttaacatgtggagggaaattctatccaataccacaaaaacactagatatatcatctttttattggagtttatcggatgaagtgggtacgaatttcggcacgataatattaaacgagattgtacaattacccaaaagaggagtacgagttagagtagccgttaataaatctaacaaaccattaaaggatgttgaaagactacaaatggccggagttgaagtacgatacatagatattacaaatatcctaggaggagttcttcatacaaaattttggatatctgataatacacatatttatttaggaagcgctaacatggattggagatcactaactcaggtcaaggaattgggtattgcgatcttcaataataggaacttggcagcggatctcactcaaatttttgaggtatactggtatcttggagttaacaatctaccatataattggaaaaacttttatccgtcgtattataatacagatcatcctcttagtattaacgtaagcggcgttccacactctgtatttattgcttctgcaccgcaacaactatgtactatggaaagaaccaatgatttaaccgctttattgtcatgtattagaaatgcgagtaaattcgtttatgtatctgttatgaactttatccctattatttattcgaaggcgggtaaaattttgttttggccttatatagaagatgaattaagaagatccgctatagacagacaagtatccgttaagctattgattagttgctggcaacgatcttcgtttatcatgagaaactttttaagatctatcgctatgctaaaatctaaaaacataaatatagaagtaaagctatttattgtaccagatgctgatcctcccattccgtattctagggtaaaccatgccaaatatatggtaaccgataaaacggcctatataggtacctcaaattggacaggaaattactttacggatacatgtggagcatctattaatattacaccggatgatggattaggtcttcgtcaacaattggaagatatttttatgcgtgattggaattcaaaatacagctatgaattgtacgatactagtcctactaaaaggtgtaaactattaaaaaatatgaaacaatgtacaaatgatatatactgcgacgagatacaaccggaaaaagaaattcctgaatattctcttgaataa

SEQ ID NO: 196 - DNA, 135 bp, Vaccinia virus
  VACGL044
atgcaacatgcaaattgtaatagagaaataaaaatttatgaaggtgccaaacatcatcttcataaggaaacggatgaagttaaaaaatcagtcatgaaagaaatagaaacttggatttttaatagagtgaagtga

SEQ ID NO: 197 - DNA, 405 bp, Vaccinia virus
  VACGL045
atgactttggtacagcacgtggtaactattaaatctacttattgggtcattccatgggagctagcctcttacgataatccaaacttgtttacagcaatgattctaatgtctcctctagttaatgcagatgctgtttcaagactgaatctgctagctgccaaacttatgggaaccatcacaccaaatgcgccagtcggaaagctatgtccagaatcagtatctagagatatggataaagtttataaataccaatacgacccattagtcaatcatgaaaaaattaaggctggatttgctagtcaggtcttgaaggctaccaacaaggttagaaaaataatttccaagattaacaccccccgactctcatactccagggaacaaacaataagattagcgatgttttag

SEQ ID NO: 198 - DNA, 255 bp, Vaccinia virus
  VACGL046
atgagtgcaaactgtatgttcaatctggacaatgattacatatattgtaaatattggaaacctattacatatcctaaggcattagtattcataagtcatggagctggtaaacattctggacgttatgacgaactagctgaaaacatatcatcgttaggaattttagtattctcacatgatcatattggacatggaagaagtaatggtgaaaaaatgatgattgatgactttggtacagcacgtggtaactattaa

SEQ ID NO: 199 - DNA, 450 bp, Vaccinia virus
  VACGL047
atggcgactaaattagattatgaggatgctgttttttactttgtggatgatgataaaatatgtagtcgcgactccatcatcgatctaatagatgaatatattacgtggagaaatcatgttatagtgtttaacaaagatattaccagttgtggaagactgtacaaggaattgatgaagttcgatgatgtcgctatacggtactatggtattgataaaattaatgagattgtcgaagctatgagcgaaggagaccactacatcaattttacaaaagtccatgatcaggaaagtttattcgctaccataggaatatgtgctaaaatcactgaacattggggatacaaaaagatttcagaatctagattccaatcattgggaaacattacagatttgatgaccgacgataatataaacatcttgatactttttctagaaaaaaaattgaattga

SEQ ID NO: 200 - DNA, 681 bp, Vaccinia virus
  VACGL049
atgttgtcgatgtttatgtgtaataatatcatagattatgtagatgatatagataatggtatagtacaggatatagaagatgaggctagcaataatgttgatcacgactatgtatatccacttccagaaaatatggtatatagatttgacaagtccactaacatactcgattatctatcaacggaacgggaccatgtaatgatggctgttcgatactatatgagtaaacaacgtttagacgacttgtatagacagttgcccacaaagactagatcatatatagatattatcaacatatattgtgataaagttagtaatgattataatagggacatgaatatcatgtatgatatggcatctacaaaatcatttacagtttatgacataaataacgaagttaatactatgctaatggataacaaggggttgggtgtaagattggcgacaatttcatttataaccgaattgggtagacgatgtatgaatccagtaaaaactataaaaatgtttactctactatcgcatactatatgcgatgattgttttgtagattatataacggacatttcaccaccagataataccatccctaacactagcacgcgtgaatatctaaagcttattggcatcacagctatcatgtttgctacatataaaactctcaaatacatgataggataa

SEQ ID NO: 201 - DNA, 444 bp, Vaccinia virus
  VACGL050
atgttcaacatgaatattaactcaccagttagatttgttaaggaaactaacagagctaaatctcctactaggcaatcgccgggtgctgccggatatgatttgtatagcgcttacgattatactatccctccaggagaaagacagttaattaagacagatattagtatgtccatgcctaagttctgctatggtagaatagctcctaggtctggtctgtcactaaaaggcattgatataggaggtggtgtaatagacgaagattataggggaaacataggagtcattcttattaataatggaaaatgtacgtttaatgtaaatactggagatagaatagctcagctaatctatcaacgtatatattatccagaactggaagaagtacaatctctagatagtacaaatagaggagatcaagggtttggatcaacaggacttagataa

SEQ ID NO: 202 - DNA, 1443 bp, Vaccinia virus
  VACGL051
atgccgatatttgtcaatactgtgtactgtaagaatatattagcattgtctatgactaagaaattcaaaacaattattgatgccataggaggcaatataatagtcaattctacgatattgaaaaagttatctccttactttcgcacacatttacgtcaaaaatacacgaaaaataaagatccagttacaagggtttgtctagaccttgacattcacagtttaacttctatagttatttactcatatactggaaaggtatatatagatagtcataacgtcgtcaatttattacgtgcttctatattaacctctgtagaatttatcatctacacttgtataaactttatcttacgagattttagaaaggaatattgtgtcgagtgttacatgatgggtatagaatacggactatccaatctcttatgtcatactaaaaactttattgccaaacactttttggaactggaagatgacatcatagacaattttgattatctatctatgaaacttattctagaaagcgatgaactaaatgttccagatgaggattatgtagttgattttgtcattaagtggtatatgaggcgaagaaataaattaggaaatctgctactccttatcaaaaatgtaatcaggtcaaattatctttctcccagaggtataaataatgtaaaatggatactagactgtaccaaaatatttcattgtgataaacaaccacgcaaatcatacaagtatccattcatagagtatcctatgaacatggatcaaattatagatatattccatatgtgtacaagtactcatgttggagaagtagtatatctcatcggtggatggatgaacaatgaaatacataacaatgctatagctgtaaattatatatcaaacaattggattccaattcctccgatgaatagccccagactgtatgctagcgggatacccgctaacaataaattatacgtagtaggaggtctaccaaatcccacatctgttgagcgttggttccacggggatgctgcttgggttaatatgccgagtcttctgaaacctagatgtaatccagcagtggcatccataaacaatgttatatacgtaatgggaggacattctgaaactgatacaactacagaatatttgctacccaatcatgatcagtggcagtttggaccatccacttattatcctcattataaatcatgcgcgttagtgttcggtagaaggttattcttggttggtagaaatgcggaattttattgtgaatccagcaatacatggactctgatagatgatcctatttatccgagggataatccagaattgatcatagtggataataaactgctattgataggaggattttatcgtggatcgtatatagatactatagaagtgtacaatcatcacacttattcatggaatatatgggatggtaaataa

SEQ ID NO: 203 - DNA, 960 bp, Vaccinia virus
  VACGL053
atggaacccatccttgcaccaaatccaaatagatttgttattttcccaatccaatatcatgacatctggaacatgtataaaaaggcagaggcatcattttggacagtggaagaagtagatatatctaaagatatcaatgattggaataaactaacaccagacgaaaaatattttataaaacatgtattggcgttttttgcagccagtgacggaatagtgaatgaaaatttggcggaacgattttgtacagaagtacagattaccgaggctagatgtttctacggatttcagatggccattgaaaacattcattcggaaatgtatagtcttttgatcgatacttatgttaaagatagtaatgaaaaaaactatctctttaatgccatagaaacgatgccttgtgtaaaaaagaaggccgattgggctcaaaagtggatacatgacagcgccggttatggagagagacttattgcctttgctgcagtagaaggaattttcttttctggatcattcgcttccatattttggcttaaaaagcgtggcctaatgcccggactcacgttttccaacgaactaattagtagagacgagggtctgcactgcgatttcgcatgtttgatgtttaaacatttattgcatccaccgagtgaagaaaccgttagatctattataacagatgcagtatccattgaacaagaatttcttactgcggctcttccagttaaacttataggaatgaattgtgaaatgatgaaaacatatatagaattcgtcgcggatagattgatttctgaattgggatttaaaaaaatttataatgttaccaatccgtttgatttcatggaaaatatatcattggaaggaaaaactaattttttcgaaaaacgtgtgggtgaataccaaaaaatgggagttatgtctcaaaaagataatcatttttctctagatgttgacttttaa

SEQ ID NO: 204 - DNA, 966 bp, Vaccinia virus
  VACGL056
atgggtacgaacggcgttagagtatttgtcattttatatttgttggctgtatgcggatgtatcgaatacgacgtagacgataatgtacatatttgtacccacactgacgtgtcacatattaatcacactagttggtattataatgataaggttatagcgctagccaccgaggataaaacttctggttatatatcatcattcataaaacgcgttaatatctcattaacttgtttaaatatatcgagtttgaggtacgaagattctggtacatacaaaggagtatcgcatctaaaagatggagtcatcgttacgactactatgaatatatctgtaaaggctaatatcattgacttgactggtagagtgcgttatctaaccagaaattattgcgaagttaaaatacgatgcgaaataacatctttcgcgcttaatggttctactacaccaccacatatgatattaggaacagtagataaatggaaatatcttccatttcctacagatgattatagatacgtaggggaactgaaaagatatatatctggaaacccatatccaacagagtcgctagcgttagaaattagctcgacgtttaatcggtttactatcgttaaaaatttgaacgatgacgagttttcttgttatttgttttcacaaaattatagtttccataaaatgttgaatgtgcgtaacatttgtgaatccaaatggaaggcgttaaataataatgataatgcatcctccatgcccgcttcccacaacaatctcgcaaacgatttatctagtatgatgtcacaattacaaaatgataatgatgataataacgattattcagcacccatgaatgtagataatttaattatgatagtactaataacaatgctatcaataatacttgtaattattgtagtgattgcggcgatatcgatgtacaaaaaatccaagtacaggcatatagataactga

SEQ ID NO: 205 - DNA, 225 bp, Vaccinia virus
  VACGL057
atgagtaaaatactcacgtttgttaaaaataagataattgacttgattaataatgaccaaattaaatattctagagttataatgatagaagagtccgatagtcttttaccggttgatgaggtgcatgctaaccacggatttgactgtgtggagatgatagatgaaaatataagcaatgagaatatcgaacagtataaaaccgaatctttttttacaataaattga

SEQ ID NO: 206 - DNA, 243 bp, Vaccinia virus
  VACGL058
atgacgctcgtcatgggatcctgctgtggtagattctgtgacgctaagaataagaataagaaggaagatgtagaagagggaagagaaggatgttacaattataagaaccttaatgatctggatgaatccgaagcacgtgtagaatttggaccattatatatgataaatgaagaaaaatcagacataaatacattggatataaaaagaagatatagacacacgatagagtctgtatatttctaa

SEQ ID NO: 207 - DNA, 198 bp, Vaccinia virus
  VACGL059
atggagggatctaaacgcagacacgacagtcggcgaccacaacaagaacaggagcagcctcgtccacgtacaccgccatcatatgaagaaattgcaaaatatggacactcatttaacgtgaaaagatttacgaataaagaaatgtgtcttaaaaatgattatccacgaattatatcatataatcctccaccaaaatag

SEQ ID NO: 208 - DNA, 639 bp, Vaccinia virus
  VACGL060
atggcggaaactaaagagtttaaaactttgtataatctttttatagatagttatttacaaaaattagctcaacattctatccctactaatgtcacttgtgctattcatataggagaggttataggacagtttaaaaattgcgcgctccgaataactaacaaatgcatgagtaattctcgacttagtttcacactcatggttgaatcatttattgaagtgatttcattgcttccggaaaaggatagaagagctatcgctgaggaaataggaatagatctagacgatgtacctagtgcggtatccaagctagaaaagaactgtaatgcgtatgcggaggttaataatattatagatatacagaaattagatatcggagaatgttcggctccgcccggtcaacatatgcttttacagatagttaatacaggatccgcggaagcaaattgtggtttacagacaattgttaagtccttaaataaaatatacgttccacctattatcgaaaaccgattgccgtattacgatccgtggtttctagtgggtgtagcaattattctagttatttttactgtagctatttgttctattagacgaaatctggctcttaaatacagatacggaacgtttttatacgtttaa

SEQ ID NO: 209 - DNA, 1320 bp, Vaccinia virus
  VACGL061
atgggtgttgccaatgattcatcccctgaatatcaatggatgtctccccatagattatcagatactgttatattaggagactgtttgtattttaacaatataatgtcccaattagatttacaccaaaattgggctccgtcagttagattgttaaattattttaagaattttaataaggaaacactactaaagatagaagagaatgattacattaattcatcctttttccaacaaaaggataaacgattttatcctataaacgacgatttttatcacatatctacaggaggatatggtatagtctttaagatagataactatgtagtaaaatttgtattcgaggccacaaaattatatagtcccatggaaactacggcggagttcacagtacccaaatttctatacaacaatctaaagggagatgaaaaaaaattaatcgtgtgtgcgtgggccatgggattaaactataaattaacatttttacatactctgtataaacgtgttcttcatatgttgctattattgatacaaactatggatggtcaggaactctcattgagatattcttctaaagtttttttaaaggcgtttaacgagagaaaggacagtatcaaattcgtgaaattactatcccacttttatccggcagttattaacagtaatattaatgttataaactattttaaccgcatgtttcactttttcgaacatgaaaagagaactaactacgaatatgaaagaggaaacattataatttttcccctagcactgtattcggcagataaagtagataccgagttagctatcaaattaggatttaaatctttggtacaatacataaagtttatctttttacagatggctctgttatacattaaaatctacgaactaccctgttgcgacaactttttacacgcagatcttaaacccgataatatcttactttttgattccaatgaaccaataataattcatctaaaggataaaaagtttgtttttaatgaacgtattaaatcggcattaaacgactttgacttttcccaagtggctggaatcattaacaagaaaataaaaaacaatttcaaagttaaacataactggtattacgatttccatttctttgttcatactttattaaaaacatatccagaaatcgaaaaagatatcgaatttagtacggcattggaagaattcatcatgtgtaccaaaacagactgtgataaatatagattaaaggtttccattcttcacccaattagtttcttggaaaaatttattatgagagacattttctcagactggataaatggcggaaactaa

SEQ ID NO: 210 - DNA, 258 bp, Vaccinia virus
  VACGL062
atgaatcattggcaacacccatttattgtacaaaaagccccaatttacaaacgaaagtccaggtttgatagagacaaacaattaactattttgtctctgtttttaacacctccacagtttttaatttctttagtaatgaaattattcacaatatcagtatcttctttatctaccagagattttactaacttgataaccttggctgtctcattcaatagggtagtaatatttgtatgtgtgatattgatatctttttga

SEQ ID NO: 211 - DNA, 1065 bp, Vaccinia virus
  VACGL063
atggggttttgcattccatcgagatcaaagatgttgaagagaggatctagaaaatcctcttccatactggctaggcgtcctactcctaaaaaaatgaacatagttactgatttggaaaatcgtttaaagaagaatagctatatagaaaatactaatcagggaaacattctgatggatagcatcttcgtatccactatgccggtagaaacattgtttggatcgtacataactgatgacagtgatgattatgaacttaaggatttactcaatgttacatataacattaaaccggtcatagttcctgacatcaagttagatgctgtattagatagagatggaaattttagaccagctgactgtttcttggttaaactgaaacatagagatggattcaccaaaggagctctctatcttgggcatagtgcaggatttacggcaacaatctgcttaaaaaatgagggggtttcagggctttacattccaggtacttctgtaattcggtccaatatctgtcaaggagatactatcgtcagtagatcatctagaggagttcaatttcttccacaaataggaggagaagctatcttcttgattgtttcactttgtcctaccaaaaagttagtagaaacaggattcgtcattccagaaatatcgtcaaatgataacgccaaaatcgctgctcgcattctatcagagaaacgcaaggacaccattgctcatattgacactctaatacaacacaggcaacaattggaattggcttactataattcctgcatgttaaccgagtttctgcattattgtaattcgtatgctggcaccatcaaagaatcacttctaaaagaaacaattcaaaaagatatcaatatcacacatacaaatattactaccctattgaatgagacagccaaggttatcaagttagtaaaatctctggtagataaagaagatactgatattgtgaataatttcattactaaagaaattaaaaactgtggaggtgttaaaaacagagacaaaatagttaattgtttgtctctatcaaacctggactttcgtttgtaa

SEQ ID NO: 212 - DNA, 1908 bp, Vaccinia virus
  VACGL064
atgttaaacaggatacaaaccttgatgaaaacagctaacaattatgaaactattgagatattgcgtaactatttaagactgtatatcattttggcacgaaatgaagaaggtcatggtatactaatatacgatgataacatagatagtattatgtcgatgatgaatattacaagattagaagttataggattgacgactcattgcacaaaattaagatcatcgcctccaattcctatgtctagattgtttatggacgaaatagatcatgagtcatattattctccaaaaacttcagattatccgttgatcgatattatacgaaagcgttcccacgaacagggagatatagcactggctttagaacgatacggtatcgagaatacagattccatatcagaaattaatgaatggctgtcgtcaaaaggtttagcatgttatagatttgtaaaatttaacgattataggaaacagatgtatcgtaagttccctaggtgtactatagttgacagtatgataatagggcatataggtcatcattatatttggattaaaaatttagaaacatatacgcgtcccgaaattgatgtgttaccgtttgatattaaatacatatctagagatgaattgtgggcgcgaatttcttcctcgttagatcaaacacatataaaaaccatcgccgtatcagtttatggagctattactgataatggaccaatgccatatatgatatccacgtacccgggtaatacttttgttaactttaacagtgtaaaaaatctaattttaaattttttagattggattaaagatattatgactagtacacgaactatcattctagtaggttacatgagtaatctattcgatataccgttgctaacagtatactggcccaataattgtggatggaaaatctataataatacattaatatcatccgatggtgctagggttatttggatggatgcgtataaattttcttgcggtttatctttacaagactattgttatcattggggtagcaaaccagagagccgaccattcgatttaataaaaaaatcagatgctaaacgcaattctaaatcgttggtcaaagaatctatggcatccttgaaatccttgtacgaggcattcgagacacaatcaggagcgttagaagttttaatgagtccatgtaggatgttttcgttttctagaatagaagacatgttcttaactagtgtcatcaatagagtatccgagaatactggaatggggatgtattatcctaccaacgatataccttctctatttatcgaatcatctatctgtctagattatattatagtgaataatcaggaatccaacaaatatcgtatcaaatctgttctcgatatcatttcttcaaaacaataccctgcaggacgtcccaactacgttaaaaatggtacaaaaggaaagttatatatcgcgttgtgtaaagttaccgtacctactaacgaccatattcccgtagtttatcacgatgatgacaatactaccacctttattacagtattgacgtccgtcgatattgaaactgctatcagagcaggatattcgatagtcgaattaggggctttacaatgggatgataatattccagaacttaaaaacggtttactggatagtatcaagatgatttatgacttgaacgcagtcacaacaaataatttattggaacagctcatagaaaatattaactttaacaactctagtataatttcgttgttctatacatttgccattagttattgccgagcattcatttactcaattatggaaaccatagatccggtgtatatatctcagttcagttataaagaattatacgttagtagctcttataaagatattaatgaatccatgagtcagatggtaaaattataa

SEQ ID NO: 213 - DNA, 1119 bp, Vaccinia virus
  VACGL066
atgtggccatttgcatcggtacctgcgggagcaaaatgtaggctggtagaaacactaccagaaaatatggattttagatccgatcatttaacaacatttgaatgttttaacgaaattatcactctagctaagaaatatatatacatagcatctttttgttgtaatcctctgagtacgactaggggagcgcttatttttgataaactaaaagaggcatctgaaaaagggattaaaataatagttttgctagatgaacgagggaaaagaaatctgggagagctacaaagtcactgcccggatataaattttataaccgttaatatagataaaaaaaataatgtgggactactactcggttgtttttgggtgtcagatgatgaaagatgttatgtaggaaacgcgtcatttactggaggatctatacatacgattaaaacgttaggtgtatattctgattatcccccgctggccacagatcttcgtagaagatttgatacttttaaagcctttaatagcgcaaaaaattcatggttgaatttatgctctgcggcttgttgtttgccagttagcactgcgtatcatattaagaatcctataggtggagtgttctttactgattctccggaacacctattgggatattctagagatctagataccgatgtagttattgataaactcaggtcagctaagactagtatagatattgaacatttggccatagttcccactacacgtgtcgacggtaatagctactattggcccgacatttacaactccattatagaagcagccattaatagaggagttaagatcagacttctagttggtaattgggataagaacgacgtatattctatggcaaccgccaaaagtctagatgcgttgtgtgttcaaaatgatctatctgtgaaggttttcactattcagaataatacaaaattgttgatagtcgacgacgaatatgttcatatcacttcggcaaatttcgacggaacccattaccaaaatcacggattcgtcagttttaatagtatagataaacagcttgtaagcgaggctaaaaaaatatttgagagagattgggtatctagccacagtaaatcgttaaaaatttaa

SEQ ID NO: 214 - DNA, 222 bp, Vaccinia virus
  VACGL067
atgaaacacagattgtattctgaaggattgagtattagtaatgatttaaactcgataatcggtcaacaatctacaatggatacggatatagaaatagacgaagatgacatcatggaacttcttaatatattgactgagttaggttgtgatgtcgactttgatgaaaattttagcgatatagccgatgatattctagaatcgttgatagaacaggatgtataa

SEQ ID NO: 215 - DNA, 150 bp, Vaccinia virus
  VACGL068
atggtcatcggtttagtcatattcgtgtctgtagcggccgccatcgtcggtgtgttgtctaacgtattggacatgtttatgtacgtagaagaaaataatgaagaggatgctagaatcaaggaggagcaagaactactgttgctatattaa

SEQ ID NO: 216 - DNA, 477 bp, Vaccinia virus
  VACGL069
atgaggagtattgcggggctacataaattaaaaatggaaatttttaatgtagaagaattgataaatatgaaaccttttaagaatatgaataaaataacaattaatcaaaaggataattgtatattagcaaatcgatgctttgttaaaatagatactcctagatacataccatcgacatccattagcagttctaatatcatcagaatacggaatcatgattttacattatctgaattattgtattcaccgtttcattttcaacagcctcagtttcaatatctccttcctgggtttgtattaacgtgtattgataaagtttcgaaacagcaaaaagaatgtaaatattgtatctctaatcgtggagatgatgatagtttaagcattaatctatttattccgactattaacaagtctatatatattattatcggtttacggatgaaaaatttttggaagcctaaattcgaaatagaataa

SEQ ID NO: 217 - DNA, 696 bp, Vaccinia virus
  VACGL070
atgaaagtggtgattgtgactagcgtagcatcgcttctagacgcatctattcagtttcaaaaaacggcatgtaggcatcactgtaattacctatctatgcaagtagttaaagagatagaagaatttggtactatcaatgaaaaaaatttggaatttgacacttggaaagacgttatacaaaacgatgaaatagatgcattagtattttatagagtaaaacaaattagtatttctacgggtgttctatataaatctatgatgcgcaatagaacaaaacctatttccatgtactttgtacgtgattgtctggcatttgatggagatcctccgtcttttagaatgacgtcttgtaatatcaacgcatacaatcgtaataagattaaagatttgataatcctaatgaatatgaaaacatgcaataaaaaaattatcggtgagtttataatagacaattttggaagcgtcgatgcattactatcgatagttaattccaatgttacgtggattacatcagttataaataatagtaacggcaggggtattaatatcagggtatcaaataataaaatgttaactataactagttttcgacgattcgtcaataaacttaaaatgtacaaaactactaaatgcgcttctcaattggataatctatgtaccgagatgaacaaaatggatattatagacaaaaaatga

SEQ ID NO: 218 - DNA, 306 bp, Vaccinia virus
  VACGL071
atgaattctcattttgcatctgctcatactccgttttatattaataccaaagaaggaagatatctggttctaaaagccgttaaagtatgcgatgttagaactgtagaatgcgaaggaagtaaagcttcctgcgtactcaaagtagataaaccctcatcgcccgcgtgtgagagaagaccttcgtccccgtccagatgcgagagaatgaataaccctggaaaacaagttccgtttatgaggacggacatgctacaaaatatgttcgcggctaatcgcgataatgtagcttctagacttttgtcctaa

SEQ ID NO: 219 - DNA, 1440 bp, Vaccinia virus
  VACGL073
atgaataggaatcctgatcagaatacttttcctaatattacattaaagattatagaaacctatttaggcagagtacctagtgtgaacgaatatcatatgttaaaattacaagctagaaatattcagaaaataactgtttttaacaaagacatatttgtatctttagtaaaaaagaataaaaaaagatttttttccgatgttaatacatctgcatcagaaataaaagatcgtatacttagctacttttctaaacagactcaaacatataatataggtaaattatttacgattatagaactacaatctgtattagtgaccacatacacggacatattaggagttcttactattaaagctccaaatgtaatttcatctaaaatttcttataatgtaacatcaatggaagaattggcaagagatatgctaaattctatgaacgtcgcagtaatagacaaggcaaaagtaatgggacgtcataatgtatcttccctagtcaaaaatgttaataagttgatggaagaatatcttagacgccataataaaagttgtatatgttacggatcatattctctatatctaattaatccaaatatactatacggcgatatagatattcttcagactaattctaggacttttcttatagatttggcctttctaataaaatttatcacgggaaataatattatattaagtaaaatcccatatcttagaaactatatggtgataaaagatgaaaacgataatcatatcattgatagttttaatattcgccaggataccatgaacgtagttcctaaaatctttatagataatatctatatagtggatccgacgtttcaactattgaacatgataaaaatgttttctcaaatagatagattggaagatctatccaaagatcctgaaaagtttaatgcgcgtatggcaaccatgctagaatacgttagatatacacatggtatagtctttgatggtaagcgtaataatatgccgatgaaatgtatcatcgatgaaaataatcgcatagttactgttactactaaagactattttagctttaaaaaatgtctagtgtatctagatgaaaatgtgttatcgagtgatatattagatcttaacgccgacacatcgtgtgatttcgagagtgttacaaattctgtatatctaattcatgataatatcatgtatacatatttctcaaatactattctccttagtgataaggggaaggtacatgaaataagtgccagaggtttatgtgcacatatattgttgtatcagatgctgacatctggagaatacaaacaatgtttatcggatctcttaaattcgatgatgaatagagataaaatacctatctattcacatactgaaagagataaaaaacctggacgacacggatttattaatatcgaaaaggatataatagtattttag

SEQ ID NO: 220 - DNA, 2214 bp, Vaccinia virus
  VACGL074
atgatatctgtcacagatattcgtagagcgtttctagacaatgaatgccatactatcacaaaagcgtttggatatctgcacgaggacaaggctatcgcattaattaaaataggatttcatcccacttatctacccaaagtcctttataataatgttgtagaatttgttccagaaaaactatatctgtttaagccaagaactgtagctccattggatttgatatctactataacaaaattaaagaacgtggacaaatttgcctcacacataaattatcacaagaatagtatattgataacaggagacaagtctctaattgttaaatgtatgccttacatgattatttcagatgatgatatacgattcataagagaacagtttgttggtacaaattctattgagtatattctatccttcatcaacaaggaaagcatatatagaatgagttaccaattttcagagaatgaaatagtcactatcatcaatagagatcatttcatgtatgaaccaatatatgaacatcaagtcttagattctgactttcttaaaactatgttagatagatacggaatagttcccattaattctggtataatagatgaattatgtccagaagctataatagagatattaatggcagtagttcgtcctagggacgctatccgtttcttagatatagtgaataagaatcaattgacagaagatagtgtcaaaaactatatcattaatgatatcagaagaggtaaaatagattattatattccatacgttgaagattttttagaagatagaactgaagacttgggaatatatgcgaatatattttttgaggatgctatagatattacgaaactagacatcacaaagacagagttggaacatatatcaaaatacatgaattattacactacttatatagatcacatagttaacatcatcttacaaaataattatatagatatcttggcatctataatagattacgtgcaagacgtattaacagaagaattatgtattagaatagtttgcgaatcaacaaaccctgttcccgttacatctcttcctatacattctacgttagtaatggttatgtgtatacaaatgaaatatgtcgatatagttgaattcttagacgagattgacatcgatactttaatagaaaaaggagcagatccgataaccgaatacacatttacaacaagatggtacaataaacacaatgatttgatcactctttacattaagaaatatggattctgtccaatgatgatgaaacggttaatgttcgaatatccattgactaaagaagccagtgatcatttacttaaaaccatggatgaaaacaggggagctattatgttttttccgcgtactatttgcacacttccttatctattatgttgtaattataaactaattcaaaaacctattccattcaaagaagaaaatcgtaacatcgtatataagaaaaacaacagagtattatgctttgactcgttggagaactctgcgtttaaaagcctcattaaaatagattctattccaggattaaaaacttataacatgaaagacattacatacgaaaagtctaataatataatttgtgttaggtttatacctcaagaatcaattcataatgaagagcgaagaataaaattacagttattcgacattgctagattggcatcctatggactatattatattccctctagatatttatcatcgtggacaccagtagtgaacatgatagagggaagagagtacactaatccacaaaaaatagaatgtctagttattttggatttattttcagaggaattcatagaatatcaaaatctgggcaatgcggtatctaataaatatgaactggaatatactatatctaattatcaagctgccataaactgcctaatgagcacgttattaatatatctagttctaggatcaatcagatcgatatcaaaaactgaagattttgtattatctatattaaatatcttctataaaggactgaaaattaatgaattactttctgaaccagtatcaggagtttgtatcgaattagataaaataaaagatagagcgagctctggagacagtagttttatatttcttaagaaaaacgagttatcaaaaactctatcgctctgtgaaaaagtttgcgtagagaccatattagacaataatcagagttttaaatcctcaaaatga

SEQ ID NO: 221 - DNA, 573 bp, Vaccinia virus
  VACGL075
atgtctaagatctatattgacgagcgttctgacgcagagattgtgtgtgcggctattaaaaacattggaatcgaaggagctactgctgcacaactaactagacaacttaatatggagaagcgagaagttaataaagctctgtacgatcttcaacgtagtgctatggtgtacagctccgacgatattcctcctcgttggtttatgacaacggaggcggataagccggatgctgatgctatggctgacgtcataatagatgatgtatcccgcgaaaaatcaatgagagaggatcataagtcttttgatgatgttattccggctaaaaaaattattgattggaaagatgctaaccctgtcaccgttattaatgagtactgccaaattactaggagagattggtcttttcgtattgaatcagttgggcctagtaactctcctacattttatgcctgtgtagacatcgacggaagagtattcgataaggccgatggaaaatctaaacgagatgctaaaaataatgcagctaaattggcagtagataaacttcttggttacgtcatcattagattctga

SEQ ID NO: 222 - DNA, 780 bp, Vaccinia virus
  VACGL076
atggaaaatgtatacattagtagttactcatccaatgaacaaacatcaatggcggtagccgctactgatatccgagaattactatcacaatatgtggatgatgccaacttggaagacttaatagaatgggccatggaaaaatcatcaaagtactacatcaagaatataggtaatacaaaatctaatatcgaagaaactaaattcgaatcaaagaataatattggtatagaatactcaaaggattccagaaacaaactatcgtatagaaataaaccgtctattgccacaaatttggaatataaaacactatgtgatatgattaagggtactagcggcaccgaaaaagaattccttcgctatctcttattcggtataaaatgcattaagaaaggagtagaatacaatatagataaaataaaggatgtgagttacaacgattattttaacgttctcgacgagaaatacaatacaccgtgtcctaactgtaaaagtaggaatactacgccgatgatgattcaaactagagcagctgacgaacctccactagttagacacgcgtgtagagattgcaaacaacactttaagcctcccaaatttagagcatttcgcaatcttaatgttacaacgcaatcgatacatgaaaacaaggaaataacagagattcttccagataataatccatctcctccagaatctccagaaccagcatcacctatagatgacgggttaatcagagctacatttgataggaacgacgaaccaccagaggatgatgaataa

SEQ ID NO: 223 - DNA, 1026 bp, Vaccinia virus
  VACGL077
atgttgatattaacaaaagtgaatatatatatgttaataattgtattgtggttatacggctacaattttataatgagtgaaagtcagtgtccgatgatcaatgacgatagctttactctgaaaagaaagtatcaaatcgatagtgcggagtcaacaataaaaatggataagaagaggataaagtttcagaatagagccaaaatggtaaaagaaataaatcagacaataagagcagcacaaactcattacgagacattgaaactaggatacataaaatttaagagaatgattatgactactactctagaagatatagcaccatctattccaaataatcagaaaacttataaactattctcggacatttcagccatcggcaaagcatcacagaatccgagtaagatggtatatgctctgctgctttacatgtttcccaatttgtttggagatgatcatagattcattcgttatagaatgcatccaatgagtaaaatcaaacacaagatcttctctcctttcaaacttaatcttattagaatattagtggaagaaagattctataataatgaatgcagatctaataaatggagaataattggaacacaagttgataaaatgttgatagctgaatctgataaatatacaatagatgcaaggtataacctaaaacccatgtatagaatcaagggagaatctgaagaagataccctctttatcaaacagatggtagaacaatgtgtgacatcccaggaattggtggaaaaagtgttgaagatactgtttagagatttgttcaagagtggagaatacaaagcgtacagatacgatgatgatgtagaaaatggatttattggattggatacactaaaattaaacattgttcatgatatagttgaaccatgtatgcctgttcgtaggccagtggctaagatactgtgtaaagaaatggtaaataaatactttgagaatccgctacatattattggtaaaaatcttcaagagtgcattgactttgttagtgaatag

SEQ ID NO: 224 - DNA, 1704 bp, Vaccinia virus
  VACGL079
atggattttattcgtagaaagtatcttatatacacagtagaaaataatatagattttttaaaggatgatacattaagtaaagtaaacaattttaccctcaatcatgtactagctctcaagtatctagttagcaattttcctcaacacgttattactaaggatgtattagctaataccaatttttttgttttcatacatatggtacgatgttgtaaagtgtacgaagcggttttacgacacgcatttgatgcacccacgttgtacgttaaagcattgactaagaattatttatcgtttagtaacgcaatacaatcgtacaaggaaaccgtgcataaactaacacaagatgaaaaatttttagaggttgccgaatacatggacgaattaggagaacttataggcgtaaattatgacttagttcttaatccattatttcacggaggggaacccatcaaagatatggaaatcatttttttaaaactgtttaagaaaacagacttcaaagttgttaaaaaattaagtgttataagattacttatttgggcatacctaagcaagaaagatacaggcatagagtttgcggataatgatagacaaaatatatacactctatttcaacaaactggtagaatcgtccatagcaatctaacagaaacgtttagagattatatctttcccggagataagactagctattgggtgtggttaaacgaaagtatagctaatgatgcggatatcgttcttaatagacacgccattaccatgtatgataaaattcttagttatatatactctgagataaaacaaggacgcgttaataaaaacatgcttaagttagtttatatctttgagcctgaaaaagatatcagagaacttctgctagaaatcatatatgatattcctggagatatcctatctattattgatgcaaaaaacgacgattggaaaaaatattttattagtttttataaagctaattttattaacggtaatacatttattagtgatagaacgtttaacgaggacttattcagagttgttgttcaaatagatcccgaatatttcgataatgaacgaattatgtctttattctctacgagtgctgcggacattaaacgatttgatgagttagatattaataacagttatatatctaatataatttatgaggtgaacgatatcacattagatacaatggatgatatgaagaagtgtcaaatctttaacgaggatacgtcgtattatgttaaggaatacaatacatacctgtttttgcacgagtcggatcccatggtcatagagaacggaatactaaagaaactgtcatctataaaatccaagagtagacggctgaacttgtttagcaaaaacattttaaaatattatttagacggacaattggctcgtctaggtcttgtgttagatgattataaaggagacttgttagttaaaatgataaaccatcttaagtctgtggaggatgtatccgcattcgttcgattttctacagataaaaaccctagtattcttccatcgctaatcaaaactattttagctagttataatatttccatcatcgtcttatttcaaaggtttttgagagataatctatatcatgtagaagaattcttggataaaagcatccatctaaccaagacggataagaaatatatacttcaattgataagacacggtagatcatag

SEQ ID NO: 225 - DNA, 501 bp, Vaccinia virus
  VACGL080
atgggaactgctgcaacaattcagactcccaccaaattaatgaataaagaaaatgcagaaatgattttggaaaaaattgttgatcatatagttatgtatattagtgacgaatcaagtgattcagaaaataatcctgaatatattgattttcgtaacagatacgaagactatagatctctcattataaaaagtgatcacgagtttgtaaagctatgtaaaaatcatgcggagaaaagttctccagaaacgcaacaaatgattatcaaacacatatacgaacaatatcttattccagtatctgaagtactattaaaacctataatgtccatgggtgacataattacatataacggatgtaaagacaatgaatggatgctagaacaactctctaccctaaactttaacaatctccgcacatggaactcatgtagcataggcaatgtaacgcgtctgttttatacattttttagttatctgatgaaagataaactaaatatataa

SEQ ID NO: 226 - DNA, 822 bp, Vaccinia virus
  VACGL082
atggctgccaccgttccgcgttttgacgacgtgtacaaaaatgcacaaagaagaattctagatcaagaaacattttttagtagaggtctaagtagaccgttaatgaaaaacacatatctatttgataattacgcgtatggatggataccagaaactgcaatttggagtagtagatacgcaaacctagatgctagtgactattatcccatttcgttgggattacttaaaaagttcgagtttctcatgtctctatataaaggtcctattcccgtatatgaagaaaaagtaaatactgaattcatagccaatggatcgttctctggtagatacgtatcatatcttcgaaagttttctgcccttccaacaaacgagtttattagttttttgttactgacttccattccaatctataatatcttgttctggtttaaaaacacacagtttgatattactaaacacacattattcagatacgtctatacagataatgccaaacacctggcgttggctaggtatatgcatcaaacaggagactataagcctttgtttagtcgtctcaaagagaattatatatttaccggtcccgttccaataagtatcaaagatatagatcaccctaatcttagtagagcaagaagtccatccgattatgagacattagctaatattagtactatattgtactttaccaagtatgatccggtattaatgtttttattgttttacgtacctgggtattcaattactacaaaaattactccagccgtagaatatctaatggataaactgaatctaacaaagagcgacgtacaactgttgtaa

SEQ ID NO: 227 - DNA, 3021 bp, Vaccinia virus
  VACGL084
atggatgttcggtgcattaattggtttgaaagtcacggtgaaaacagatttttatatctgaaatccagatgtcgaaatggcgagaccgtatttatacgatttcctcattacttttattacgtagtgacggacgaaatatatcagtcattgtctcctcctccatttaatgcgaggccgttgggaaagatgagaactatagacattgacgagacaataagttataatctagatattaaagatagaaaatgctccgtcgcagatatgtggttgatagaagagccaaagaaacgcagcatacaaaatgccaccatggatgaatttctcaatattagttggttttatatttctaacgggatatctccagacggatgttactcgttggacgagcaatatttgacaaagattaacaatggatgttatcattgtgacgatccacgtaactgtttcgctaaaaaaatacctagattcgatatcccaagatcgtacttatttctagatatagagtgtcacttcgataagaagtttccttctgtatttattaacccaatctcgcatacaagttactgttatatcgatttaagtggtaaacgattattgtttacgctcattaatgaagagatgttaacggaacaggaaatacaagaagccgtcgatagaggatgtttgaggatacagtcactaatggaaatggattacgaacgagaactagttctatgttctgaaatagttttgttacgaatagctaaacaattgttggaactaacgttcgactacgtcgttacctttaacggacataactttgatctgagatatattactaatcgtctagagttattaacaggagagaaaattatctttagatctccggacaaaaaggaagctgtacatctctgtatttatgagagaaatcagtctagtcataagggagtaggcggcatggccaatactacgtttcacgttaataacaataatggaactatatttttcgatctatattcattcattcaaaaatttgaaaaattggattcgtacaaattggattctatatccaagaacgcgttcagttgcatgggtaaagtattaaatagaggagttagagaaatgacgttcatcggtgacgatactacagacgcgaaaggcaaagccgctgcatttgcaaaggttttaaccacaggtaattatgtgactgttgatgaggatattatatgtaaagtaattcgtaaagatatttgggaaaatggatttaaagtcgtactattatgtcctactttacctaatgatacatataaattatctttcggaaaggatgacgttgatttagctcagatgtataaggattataatctaaacatagctttagatatggctagatactgtattcatgatgcttgtttgtgtcagtatttgtgggagtattatggagtagaaacaaaaacagacgcgggtgcgtcaacatatgtgcttcctcaatccatggtattcgaatatagagcgagtacagtcatcaagggtccactgttaaagctattgttggaaactaaaactatcttagttagatcagaaacaaaacaaaagtttccttatgaaggcggtaaggtatttgctccaaaacaaaaaatgtttagtaataatgtattaatctttgattataacagtctgtatcctaatgtgtgtatctttggaaatctatctccggaaacattagtcggtgtcgttgttagtaccaatagattggaagaagaaataaataatcagctattgcttcagaaatatccacctcctagatatattacggttcattgtgaacctagactaccgaacctcatctctgaaatagcaattttcgatagatcgatagaaggaaccattcctagactattaagaacatttttggcagagagagccagatataaaaagatgctaaaacaggctaccagttcaactgaaaaggccatctatgattccatgcaatatacgtacaagatagtagccaactcagtatatggtctgatgggatttagaaatagtgctctatactcatacgcttcggctaagagttgcacatccataggacgtagaatgatcttgtatctagaatcggtactaaatggagcagagttatctaacggtatgttacggtttgccaatccattaagtaatccattttatatggacgatagagatattaatccgattgtgaaaacatcgttgcctatagattacagatttcgttttcgtagcgtgtatggagataccgactccgtgtttacagagatagacagtcaagatgtagataagtctatagaaatagcgaaagagttagaacgactgattaataatagagtattgtttaataattttaaaatagagtttgaggcggtatataagaatctgattatgcaatcgaagaagaaatatacaacgatgaaatactcagcatcgtcgaattcaaaatctgtacctgagagaattaataaaggtactagtgaaactagaagagatgtttccaagtttcataagaatatgattaagatgtacaaaaccagactgtctgagatgttgtctgaaggacggatgaattctaatcaggtatgtatagatattctccgttctttagaaacagatttacgatccgaatttgatagtagatcgtctcctctagaattatttatgttgagtagaatgcatcactcaaattataaatccgcagataaccctaatatgtatttagttactgaatataataaaaataatccagaaactatagaacttggagaacgatattattttgcatatatttgtccggctaatgtaccatggaccaaaaaacttgtaaatattaaaacatatgagacaattatcgatagaagttttaaactcggcagtgatcaaagaatattttacgaagtttactttaaacgattgacgtccgaaatagtcaatctattggataataaagttttatgcatctcattctttgaaagaatgtttggttcaaaacctacattttacgaagcataa

SEQ ID NO: 228 - DNA, 288 bp, Vaccinia virus
  VACGL086
atgaatcccaaacattggggaagagccgtatggaccattatttttatagtactttcgcaagcgggtttagacggcaacatagaagcgtgtaaacgaaaactatatactatagttagcactcttccatgtcctgcatgtagacggcacgcgactatcgctatagaggacaataatgtcatgtctagcgatgatctgaattatatttattattttttcatcagattatttaacaatttggcatctgatcccaaatacgcgatcgatgtgacaaaggttaaccctttataa

SEQ ID NO: 229 - DNA, 390 bp, Vaccinia virus
  VACGL087
atggaactcgttaatatttttttagaaacggatgctggaagagtaaagtttgccataaaaaataccgacgatgtatgtgcctcggagttaataaataaatttgtggaactgttaagtgaatacattcacattgaccaatcagaattttatttggtggtaaaggataaggatattttttattttaagtgtgatagggggtctatttcgattgtaaacaatgagttttatgtctttgacgaacccttgctgtttgttaaagatttcactaatgtaacgggggttgaattcatagtcacagaaaccatgccgtgtagaattataccaaaaaataatcacgcggttatttcagttgtgactaatcataagttttataatgggttaagtttataa

SEQ ID NO: 230 - DNA, 2001 bp, Vaccinia virus
  VACGL088
atgttcatgtatccggaatttgcgaggaaggctttatcaaagcttatttcaaaaaaattaaacattgaaaaggtgtctagcaagcaccagctcgtgttactggattatggattacacggactattgccaaaatcactgtatctggaagctattaattccgatattctcaatgttagattctttcctcctgaaataataaacgtcactgatatcgttaaggctctccaaaattcttgtagagtagatgagtacctaaaatctgtttccttatatcataagaattctttaatggtatcgggaccaaatgtagtcaagcttatgatagaatataatcttcttacacacaatgacttggaatggttaattaatgagaatgtagtcaaggctacataccttttaaaaatcaatgcctatatgattaactttaaaatagatctaacggttgatgaaatcattgacttagttaaagatattcctgtaggagctacgctacatctatataatatattaaacaatatagatttggacattgttcttcgtatatctgatgaatataatataccacctgttcacgatattctgtctaaacttaccgatgaagagatgtgtataaaactagttacaaagtatcctatggacaatgttataaattttattaatcaagatgttagatatagtcccaccttcatcaagacaattaaagattttgtcaacaagcatcttccaaccatgtacgacggattaaatgattatctacattctgttattatcgacgaggacttaatagaggaatataaaattaaatccgttgccatgtttaatttggaatacaaaactgatgtaaatactctaacattggacgaacagatatttgtagaggtaaacatctcatattatgattttagatatagacaatttgccgatgaatttagagattacattatgataaaagaaagaagacaaatcaccatgcaatctggtgatagaataagaaggtttaaacgtcccatgtcattgagatccactatcatcaaaaaggatactgattctctagaggatattctcgcacatatagataatgccagaaaaaatagcaaggtatctattgaagatgttgagagaatcatttcatctttccgtcttaatccctgtgttgtcagacgcaccatgctgtctgatatagatatcaaaacaaagataatggtgctaaaaattgtcaaagattggaaatcttgtgctctgacactatcagccatcaaaggaattatggtaacagataccatcaataccgtgttatccaaaattctgcatcatcataggaatgtcttcaagtatcttacatctgtagagaataaagaaattgctgtctgtaattgctccagatgtctgtcgctcttctatagagaattaaaaagtgtacgatgtgatctacacacagacgatggattattggataggctatacgatctgactagatacgccttacacggaaaaatcaatcaaaacttaatcggtcaacgatgttggggtccgttgacagaaatgctgtttaacgagaataaaaagaaaaaactaaataatttaatggaatacatcaaaatatcagacatgttggtatacggacactctatcgagaagacgcttattccaattactgattctctttcattcaagctatctgttgataccatgtctgtgttaaatgatcaatatgccaaggttgtcatcttcttcaataccatcatagaatatattatagctactatctattatagattgacagtcttggacaattatactaatgtcaaacattttgtatccaaagtgttacacactgtcatggaagcatgtggcgtactgttttcatacattaaagttaatgacaaaatagagcatgaattggaggagatggtggacaaaggtaccgtaccttcttatttgtatcatctgtccatcaacgtcatttcaataatattggatgatataaatggaactcgttaa

SEQ ID NO: 231 - DNA, 189 bp, Vaccinia virus
  VACGL090
atgattaagtattgttttttcattatttttatattttctcaacaagttctcaataccccaatagatgatagaatatcacccaatgcgtccatgttgtctatttccaacaggtcgctatatccaccaatagaagtttttccaaaaaagattctaggaacagttctaccaccagtaatttgttcaaaataa

SEQ ID NO: 232 - DNA, 327 bp, Vaccinia virus
  VACGL091
atggccgaggaatttgtacaacaaaggttggccaataacaaagtgacaatttttgtcaagtatacatgtcctttttgtagaaatgcactggatattctaaataagtttagtttcaaaagaggagcgtatgaaattgtcgatattaaagaatttaaacccgaaaatgaattgcgggattattttgaacaaattactggtggtagaactgttcctagaatcttttttggaaaaacttctattggtggatatagcgacctgttggaaatagacaacatggacgcattgggtgatattctatcatctattggggtattgagaacttgttga

SEQ ID NO: 233 - DNA, 939 bp, Vaccinia virus
  VACGL092
atggcggaatttgaagatcaactcgttttcaatagtatcagtgcccgtgcattgaaagcttatttcactgctaaaatcaatgaaatggtagatgagttggttactagaaaatgtccgcaaaagaaaaaatcacaagctaaaaaacctgaagtacgcattcctgtagatctcgtaaagtctagttttgttaaaaagtttggattgtgcaattatggaggaatccttatcagtcttattaatagtctagtagaaaataatttctttacaaaggatggaaaactggatgatacaggcaaaaaggaattggttttgacggatgtcgaaaaacgaattcttaatgccatagataaatcatctcctttgtatatcgatattagtgatgttaaagtattggctgctagactaaaaagaagcgctacacaatttaactttaatggacatacatatcatctggaaaatgataaaatagaagatctcattaatcagttggttaaggacgaatccattcaactggatgaaaagagttctattaaagatagtatgtatgtcattcccgatgaacttatcgatgttctcaaaactagattgtttagatctcctcaagtcaaggataatattatttcgcgtactagattgtatgattattttactagagttactaagagagacgaatcgtcaatctatgtgattctaaaggatcctaggatcgctagcattttgtcactagaaactgttaaaatgggcgcctttatgtatacaaaacatagtatgttgacgaacgctatttcatctagagtcgatagatattctaaaaagtttcaagaatctttttacgaagatattgcagaatttgttaaagaaaatgagagagttaatgtatcgagagtggttgaatgtttgactgtgcctaatattactatatcaagtaatgctgaataa

SEQ ID NO: 234 - DNA, 216 bp, Vaccinia virus
  VACGL093
atggataagttgtacgccgctatatttggtgtatttatggggtctccggaagatgatttgacagactttatagaaattgttaaatctgttctaagtgatgagaaaactaccacatcaactaataataccggttgttggggttggttaattattattttttttatagttcttattctactactattgatatatttgtatttaaaagttgtttggtga

SEQ ID NO: 235 - DNA, 810 bp, Vaccinia virus
  VACGL094
atgagtaaggtaatcaagaagagagttgaaacttcaccaagacctactgcatctagcgattctctacagacttgtgcgggtgttatagagtatgcaaaatcgattagtaaatctaatgcaaaatgtatcgaatacgttacactaaatgcttctcaatacgctaattgttcgtctatctctataaaacttactgatagtttatctagtcaaatgacttccacttttattatgttggaaggagagactaaactttataaaaataaatctaaacaagatagaagcgatggatactttctaaaaataaaagttaccgcggctagtcctatgttgtatcaacttctagaagccgtctatggaaacattaagcacaaggaacgcattccaaattctttgcatagtctttcggtggaaactattacagagaaaacatttaaggatgaatccatcttcatcaacaaattaaacggatccatggtagaatatgtttcgactggagaatcatccattctcagatctatagaaggtgaactagaatcactcagtaaaagagaaagacaattggccaaggcaattatcacacctatcgtcttctatagatccggaacggaaacaaaaattactttcgcgctcaagaaactaatcattgatagagaagtggtggctaacgttatcggactctctggagatagtgaacgtgtatcaatgactgaaaatgtagaagaagatctggctcgtaatctgggacttgttgatattgatgatgaatatgatgaagatagcgataaagaaaagccaatattcaatgtataa

SEQ ID NO: 236 - DNA, 2316 bp, Vaccinia virus
  VACGL095
atgtttgtcattaaacgaaatggatacaaggaaaatgtcatgtttgataaaatcacgtctcgtattagaaaattatgttatggcttaaacacggatcatatagatcctattaaaatagctatgaaggttattcaaggaatatataatggagtaacaacggtagaattggacactctggcagccgaaatagcagccacttgtactacacaacatccggattatgccattctagccgccagaatagccgtatcaaatctacacaaggaaacaaaaaaactatttagtgaagtgatggaggatttattcaactatgttaatcctaaaaatgggaaacattctccgattatttcaagtatcaccatggatatagttaacaaatataaggataaactcaactcggttattatttacgaacgagacttttcatacaactattttggttttaaaactttggaaaaatcctacttgttgaaaataaacaacaagatcgttgaaagacctcagcacatgttaatgcgtgtcgcagtaggaattcatcaatgggatatagactcagctattgagacgtacaatctactttctgaaaaatggtttacgcacgcttctcctaccttatttaatgcgggaactagtcgtcaccaaatgtctagctgttttctacttaacatgatcgatgatagcatagagggtatctatgacacgttaaaacgatgcgcattaatctctaaaatggcagggggaataggtctatcaattagtaatattcgtgccagtggaagctatatctccggtaccaatggtatatcaaacggtattattccaatgttgagagtttataataacaccgctagatacatagatcagggaggaaacaaacggcctggagttatggccatatacttggaaccgtggcattctgatattatggcgttcctcgatcttaaaaagaatacaggaaacgaggaacatagaaccagagatctatttatagctctttggattcctgatctctttatgaaacgagtgaaggatgacggagagtggtcgttgatgtgtccggatgaatgtcctggattggacaatgtttggggagacgagttcgaacgattgtatacactatacgaaagagaaaggagatacaaatctataataaaggctcgagtcgtctggaaagcgattatagaatctcagattgaaactggtactccattcattctttataaggatgcgtgtaacaaaaagagtaatcaacaaaatttaggaactatcaagtgtagtaatctttgcactgagataatacaatatgcggatgctaatgaggtagccgtttgtaatctggcatctgttgccttgaacatgtttgtaatagatgggcgatttgattttctcaaactgaaggatgtggtcaaagtaattgtcagaaatctcaataaaattatagatattaattattatcctattccagaagctgaaatctctaataagagacatagacctatcggtattggtgttcaaggattagcggacgcgtttattctcttaaattatccatttgatagcctggaagcacaagatctaaataagaagatcttcgaaaccatttattacggtgcattagaggcgagttgtgaactagctgagaaggaaggaccatacgatacatatgtaggatcgtacgccagtaacggtattctacaatatgatctttggaatgttgtaccgtcggatctttggaattgggaacctctaaaagataaaatcagaacatacggtcttagaaatagtttattggtggcacctatgccgactgcatcaactgctcaaattttgggaaataatgagtcggtggaaccgtataccagtaatatttacactcggagagtattgtctggagaatttcaagtagttaatccgcatctccttagagttttaaccgagagaaaattatggaatgatgagatcaagaataggattatggcagatggtggatccattcagaatacaaaccttccagaagatattaagcgagtttataaaactatttgggaaattccacaaaagacgatcataaaaatggctgcagacaggggagccttcatcgatcaaagtcaatctatgaatatccatatagcagatccgagttattccaaactaacgagtatgcatttttacggatggagtctcggtctaaaaacgggaatgtactatctacgtacgaaacccgcatccgctcccattcaattcacattggacaaggataaaataaaaccactggtggtttgcgattccgaaatctgtacatcatgcagtggttaa

SEQ ID NO: 237 - DNA, 240 bp, Vaccinia virus
  VACGL098
atggtggatgctataaccgttctaactgcgatcggtataactgtattaatgcttttgatggtaatttctggcgccgccatgatagtcaaggagttaaatcctaatgatatattcactatgcaatcattaaagtttaatcgagccgtaacgattttcaaatatataggactctttatctatataccaggaacaatcattttgtacgctacatacgtcaaatccctattaatgaaaagttaa

SEQ ID NO: 238 - DNA, 1149 bp, Vaccinia virus
  VACGL099
atgaataactttgttaaacaagtagcttcaaagtctctaaaacctaccaaaaaattgtctccgtcagatgaggtgatatctttaaacgaatgcataatatcctttaacttggataacttttattattgcaacgatggactgtttactaagcccattaatactccggaggatgttcttaaatcactcttgatcatggaatcattcgcctacgagaagatgataatcaaaggattgataaaaatactaatatctagagcatatattaatgatatttattttactccgttcggttggttgacgggcgtcgacgatgatcctgaaacacacgtggtgataaaaataattttcaattcatcactaatatctatcaagtctcaagttatagaatatttaaaaccatacaatgtcaataacctatcggtacttaccacagaaaaagaattaagtattaatacgttcaatgttccggattctatacctatgtcgataatttcgtttttcccattcgatacagattttatactagttattttgttttttggagtatataatgactcgtattgtggaataagctatataagtccgaaagagagactaccgtatatcatcgaaatattaaaaccgttggtgtcggaaattaacatgttatcggatgaaataggtagaacatcatccattagaatcttcaattccaatagcgtcaaaaaatttcctactaatacattaacatccatttgtgaaattgtttattcgtttgatgaatcatcctttccgacgcctaagacgtttactcctctaaacgcgagtccatacattcctaaaaagatagtttcactattggatttaccatctaatgtggaaataaaggcgatatctagaggcggtgtggatttcatcactcatattaataataagcgtctaaacacaatcttggtaatagcaaaagataactttttaaaaaattctacattttctggaacttttatcaaagagaatattatttggaagggtatctatacttatagaataatcaagtctagttttccagttcctactattaagtcggttactaataagaaaaaaatatgtaagaaacattgtttcgtcaattctcagtatacaactaggactttgtcacatattctttga

SEQ ID NO: 239 - DNA, 1272 bp, Vaccinia virus
  VACGL100
atggaaagatatacagatttagtaattagtaaaataccagaactaggatttaccaatttattatgtcatatatattcactagctggattatgtagcaatatagatgtatctaaatttttaacaaattgtaacggatatgtagtggaaaaatatgataaatctacaaccgccggcaaagtgtcttgtattcctatcggtatgatgttggaactagtagagtcggggcacctgagcagacccaatagtagcgacgaactcgatcaaaagaaagagttaaccgacgagttaaagacgcgttaccattctatatatgatgtctttgagttacctactagtataccgttagcgtatttttttaaacctcgactacgggaaaaagtatctaaggcgatagacttctcacaaatggatttgaaaatcgatgatttatcacgtaaaggaatacatactggtgaaaatccaaaggtcgtcaagatgaaaatagagcctgagagaggagcctggatgagcaatcgaagtattaagaacttagtctctcagtttgcttatggatccgaagtggattatataggacaatttgacatgagattcttaaactccttagcgattcatgaaaaatttgacgcgtttatgaataaacatatcttatcgtatatacttaaagacaaaattaaaagttctacctctagatttgtaatgtttggattttgttatttgtctcattggaaatgtgtaatttatgataaaaaacaatgtttagtatccttttatgactccggaggcaatattccaactgaattccaccactataataatttttatttctattccttctccgatggttttaacacgaatcacaaacattctgtattggataatacaaattgtgacatcgatgttttattcagatttttcgaatgtacatttggagcgaaaataggctgtattaatgtggaagttaatcagctgttggaatctgaatgtggaatgtttattagtttgtttatgatattgtgtactaggacaccacctaagagtttcaaatctctgaaaaaggtttatacattctttaaatttttagcggataagaaaatgacattatttaagagcattctatttaacttgcaagatctatccctggatataacggaaacggataacgcaggattaaaagaatataaacgtatggaaaagtggaccaaaaagtcaattaatgtgatatgtgataaattaactacaaaattaaatagaatagtagacgacgatgaataa

SEQ ID NO: 240 - DNA, 2031 bp, Vaccinia virus
  VACGL101
atggaaaagaatttaccagatatcttcttttttccaaactgcgttaatgtattctcttacaaatattcacaagatgaattcagtaatatgagtaaaacggaacgtgatagtttctcattggccgtgtttccagttataaaacatagatggcataacgcacacgttgtaaaacataaaggaatatacaaagttagtacagaagcacgtggaaaaaaagtatctcctccatcactaggaaaacccgcacacataaacctaaccgcgaagcaatatatatacagtgaacacacaataagctttgaatgttatagttttctaaaatgtataacaaatacagaaatcaattcgttcgatgagtatatattaagaggactattagaagctggtaatagtttacagatattttccaattccgtaggtaaacgaacagatactataggtgtactagggaataagtatccatttagcaaaattccattggcctcattaactcctaaagcacaacgagagatattttcagcgtggatttctcatagacctgtagttttaactggaggaactggagtgggtaagacgtcacaggtacccaagttattgctttggtttaattatttatttggtggattctctactctagataaaatcactgactttcacgaaagaccagtcattctatctcttcctaggatagctttagttagattgcatagcaataccattttaaaatcattgggatttaaggtactagatggatctcctatttctttacggtacggatctataccggaagaattaataaacaaacaaccaaaaaaatatggaattgtattttctacccataagttatctctaacaaaactatttagttatggcactcttattatagacgaagttcatgagcatgatcaaataggagatattattatagcagtagcgagaaagcatcatacgaaaatagattctatgtttttaatgactgccacgttagaggatgacagggaacggctaaaagtatttttacctaatcccgcatttatacatattcctggagatacactgtttaaaattagcgaggtatttattcataataagataaatccatcttccagaatggcatacatagaagaagaaaagagaaatttagttactgctatacagatgtatactcctcctgatggatcatccggtatagtctttgtggcatccgttgcacagtgtcacgaatataaatcatatttagaaaaaagattaccgtatgatatgtatattattcatggtaaggtcttagatatagacgaaatattagaaaaagtgtattcatcacctaatgtatcgataattatttctactccttatttggaatccagcgttactatacgcaatgttacacacatttatgatatgggtagagtttttgtccccgctccttttggaggatcgcaacaatttatttctaaatctatgagagatcaacgaaaaggaagagtaggaagagttaatcctggtacatacgtctatttctatgatctgtcttatatgaagtctatacagcgaatagattcagaatttctacataattatatattgtacgctaataagtttaatctaacactccccgaagatttgtttataatccctacaaatttggatattctatggcgtacaaaggaatatatagactcgttcgatattagtacagaaacatggaataaattattatccaattattatatgaagatgatagagtatgctaaactttatgtactaagtcctattctcgctgaggagttggataactttgagaggacgggagaattaactagtattgtacgagaagccattttatctctaaatttacaaattaagattttaaattttaaacataaagatgatgatacgtatatacacttttgtaaaatattattcggtgtctataacggaacaaacgctactatatattatcatagacctctaacgggatatatgaatatgatttcagatactatatttgttcctgtagataataactaa

SEQ ID NO: 241 - DNA, 1776 bp, Vaccinia virus
  VACGL102
atgattgtcttaccgaataaagttcgtattttcatcaacgatcggatgaaaaaggatatctacttgggaatttctaatttcggattcgagaatgatatagatgaaatcttgggaattgctcacttgttggaacatctacttatatcctttgattctactaattttttagcgaatgcttctacatctagaagttatatgagtttttggtgtaaatccattaattcagcaacggaatcggacgcaatcagaacattagtttcgtggttcttttctaacggaaaactcaaagataatttttccctttctagtatacgatttcacattaaagaattagaaaacgaatactattttagaaatgaagtattccattgtatggatatactaacgtttcttagcggaggcgatttatataacggtgggagaatagacatgatagataatcttaatatagttcgtgatatgctggtaaatagaatgcaaaggatatcgggatcgaatatcgtaatttttgttaagagattaggacctggaacattggatttcttcaaacagacatttgggtctttaccagcatgtccggagattattccttcatctattccagtaagtacaaacggtaaaatagttatgactccgtctccattttatacagttatggtaaagattaatccaacattagataatattttagggattctgtatttgtacgaaacttaccacttaatagactatgagactatcggcaaccagttatatttaacggtatcctttatcgatgaaactgaatacgagagctttcttcgtggcgaggctatattacaaattagtcaatgtcaacgtattaatatgaattatagcgacgattatatgatgaacatctatttaaattttccttggctatcgcatgatttatatgattacattacacgtattaatgacgatagcaagtcgatactaatatccttgacgaatgaaatatatgcatctataattaatagagatatcatagttatttacccaaactttagtaaggccatgtgtaacactagagatacccaacaacatccgatagtagttcttgacgcaaccaatgatggactgattaagaaaccttatagaagtatacccctaatgaagcgtctaacatctaatgaaatatttatacgatacggagacgcgtctctcatggacatgataactttatcattgtctaaacaagatatatcattaaaaagaaatgccgaaggaatacgtgtaaaacatagtttttcagctgatgatatacaggcaattatggaatctgattcgtttttaaagtatagtagatcaaaaccagctgcgatgtatcaatatatatttctatcattttttgctagtggtaattccatagatgacatattggcaaatagagattctaccttagaattttctaaaagaactaaaagtaaaattttgtttggtaggaataccaggtacgacgtcactgcaaaatctagttttgtatgtggtatagtacgaggtaaatcattggataaaacgtctctggttgaaatgatgtgggatctcaagaagaaaggattaatatattctatggaatttaccaatctattgagcaagaataccttttatctgttcacatttactatctacactgatgaagtatacgattatctaaacactaataaacttttttctgcaaaatgtttagtcgtgtctacaaaaggagatgtggaaaatttttcatctctaaaaaaagatgtggtcattagagtttga

SEQ ID NO: 242 - DNA, 336 bp, Vaccinia virus
  VACGL103
atggcatctttattatatcttattttatttttgttattcgtatgtatttcttattattttacatattatccgaccaataaacttcaggcagctgtaatggaaacagatagagaaaacgctattattagacagcgaaatgatgaaataccgactagaacattagatacagctatatttaccgatgcatcaaccgtcgcgagtgcgcaaatacacctatattataattccaatattggtaaaattataatgtcacttaatggtaaaaaacacacctttaatttatacgatgataacgacatacgaacattacttcctattttactccttagtaaatga

SEQ ID NO: 243 - DNA, 663 bp, Vaccinia virus
  VACGL104
atgccatttagagatctaattttgtttaacttgtccaaattcctacttacagaagatgaggaatcgttggagatagtgtcttccttatgtagaggatttgaaatatcttataatgacttgataacttactttccagataggaaataccataaatatatttataaagtatttgaacatgtagatttatcggaggaattaagtatggaattccatgatacaactctgagagatttagtctatcttagattgtacaagtattccaagtgtatacggccgtgttataaattaggagataatctaaaaggcatagttgttataaaggacaggaatatttatattagggaagcaaatgatgacttgatagaatatctcctcaaggaatacactcctcagatttatacatattctaatgagcgcgtccccataactggttcaaaattaattctttgtggattttctcaagttacatttatggcgtatacaacgtcgcatataacaacaaataaaaaggtagatgttctcgtttccaaaaaatgtatagatgaactagtcgatccaataaattatcaaatacttcaaaatttatttgataaaggaagcggaacaataaacaaaatactcaggaagatattttattcggtaacaggtggccaaactccatag

SEQ ID NO: 244 - DNA, 375 bp, Vaccinia virus
  VACGL105
atgaagaacgtactgattattttcggtaaaccgtattgtagtatttgtgaaaatgtcagtgagtcagtagaagaattaaaattcgagtatgatatactccatgttgatatcttatcattttttttaaaggatggtgattcaagtatgctgggtgacgtgaagcgcggaaccctaataggaaacttcgcagcgcatctatctaactacatcgtttccattttcaaatacaatccacagacaaaacaaatggcatttgtggacattaataaatccttggatttcaccaaaaccgataaatcgctggtgaatttggaaattctaaaatccgaaatagaaaaagctacctatggagtttggccacctgttaccgaataa

SEQ ID NO: 245 - DNA, 1305 bp, Vaccinia virus
  VACGL106
atgggtatcaaaaacttaaaatcgttactgctggaaaataaatcactgacgatattagatgataatttatacaaagtatacaatggaatatttgtggatacaatgagtatttatatagccgtcgccaattgtgtcagaaacttagaagagttaactacggtattcataaaatacgtaaacggatgggtaaaaaagggagggcatgtaaccctttttatcgatagaggaagtataaaaattaaacaagacgttagagacaagagacgtaaatattctaaattaaccaaggacagaaaaatgttagaattagaaaagtgtacatccgaaatacaaaatgttaccggatttatggaagaagaaataaaggcagaaatgcaattaaaaatcgataaactcacatttcaaatatatttatctgattctgataacataaaaatatcattgaatgagatactaacacatttcaacaataatgagaatgttacattattttattgtgatgaacgagacgcagaattcgttatgtgtctcgaggctaaaacacatttctctaccacaggagaatggccgttgataataagtaccgatcaggatactatgctatttgcatctgctgataatcatcctaagatgataaaaaacttaactcaactgtttaaatttgttccctcggcagaggataactatttagcaaaattaacggcgttagtgaatggatgtgatttctttcctggactctatggggcatctataacacccaccaacttaaacaaaatacaattgtttagtgattttacaatcgataatatagtcactagtttggcaattaaaaattattatagaaagactaactctaccgtagacgtgcgtaatattgttacgtttataaacgattacgctaatttagacgatgtctactcgtatattcctccttgtcaatgcactgttcaagaatttatattttccgcattagatgaaaaatggaatgaatttaaatcatcttatttagaaagcgtgccgttaccctgccaattaatgtacgcgttagaaccacgcaaggagattgatgtttcagaagttaaaactttatcatcttatatagatttcgaaaatactaaatcagatatcgatgttataaaatctatatcctcgatcttcggatattctaacgaaaactgtaacacgatagtattcggcatctataaggataatttactactgagtataaataattcattttactttaacgatagtctgttaataaccaatactaaaagtgataatataataaatataggttactag

SEQ ID NO: 246 - DNA, 192 bp, Vaccinia virus
  VACGL107
atggtgttccaactcgtgtgctctacatgcggtaaagatatttctcacgaacgatataaattgattatacgaaaaaaatcattaaaggatgtactcgtcagtgtaaagaacgaatgttgtaggttaaaattatctacacaaatagaacctcaacgtaacttaacagtgcaacctctattggatataaactaa

SEQ ID NO: 247 - DNA, 498 bp, Vaccinia virus
  VACGL108
atggatccggttaattttatcaagacatatgcgcctagaggttctattatttttattaattataccatgtcattaacaagtcatttgaatccatcgatagaaaaacatgtgggtatttattatggtacgttattatcggaacacttggtagttgaatctacctatagaaaaggagttcgaatagtcccattggatagtttttttgaaggatatcttagtgcaaaagtatacatgttagagaatattcaagttatgaaaatagcagctgatacgtcattaactttattgggtattccgtatggatttggtcatgatagaatgtattgttttaaattggtagctgactgttataaaaatgccggtattgatacatcgtctaaacgaatattgggcaaagatatttttctgagccaaaacttcacagacgataatagatggataaagatatatgattctaataatttaacattttggcaaattgattaccttaaagggtga

SEQ ID NO: 248 - DNA, 1116 bp, Vaccinia virus
  VACGL109
atggctgcagaacagcgtcgttctacaatttttgacatagtttcaaaatgtatagtgcaatctgtattgagagatatatctattaattctgaatacatagagtccaaagctaaacaattgtgctattgtccggcatcgaaaaaggaatcggtgattaatggtatctacaattgttgcgagtcaaatatagaaataatggacaaagagcagctattaaaaatattggacaatcttcgatgtcattcggctcatgtatgtaacgccacagatttctggagactatataattcgttaaaacggtttactcatactaccgcattctttaatacatgcaagcccactattctagccacgctaaacactttgataaccctgattttatctaacaagttattgtatgcggcagaaatggtagagtatctagagaaccaactagattcatcaaataaatcaatgtctcaagaactagcagaattattggaaatgaaatatgctctcattaatctggtacaatataggattttgccaatgatcatcggtgagcctattatagtagctggattttctggtaaagaaccaatttctgattattctgcagaagtggaaaggctaatggaactaccagttaaaactgatatagtgaataccacatatgacttcttagccagaaaaggtattgatactagcaacaatatagcagaatatatagccggcttgaaaatagaagagattgaaaaggtagaaaaatatttaccagaagttatatctacaattgccaatagtaatataataaaaaataaaaaatctatctttccggccaatatcaacgataaacagatcatggaatgctctagaatgttagacacgagtgagaaatactctaaaggatataaaactgatggagctgtgactagtccattgacgggaaataatacaattacaacatttataccaatttctgcgtccgatatgcaaaagtttaccattttagaatatctttacattatgagagtgatggcaaacaacgttaagaaaaagaacgagggaaaaaacaacggaggagtagttatgcatattaactcaccctttaaggtaatcaatttgccaaaatgttaa

SEQ ID NO: 249 - DNA, 210 bp, Vaccinia virus
  VACGL111
atgtttacagatccgcccaaggcggcaaaaatatacattaactcatccgtcgagtctacatttatagacacttcttcactgaactctgaaaaatatgccacaatttggcgcagtttatcgatttttatacggatgctcattttaaatttttgtaaattatttaaagttaaatggctgcagaacagcgtcgttctacaatttttgacatag

SEQ ID NO: 250 - DNA, 783 bp, Vaccinia virus
  VACGL112
atgagcatccgtataaaaatcgataaactgcgccaaattgtggcatatttttcagagttcagtgaagaagtgtctataaatgtagactcgacggatgagttaatgtatatttttgccgccttgggcggatctgtaaacatttgggcaattatacctctaagtgcatcagtgttttaccgaggagccgaaaatattgtgtttaatcttcctgtgtccaaggtaaaatcgtgtttgtgtagttttcacaatgatgccatcatagatatagaacctgatctggaaaataatctagtaaaactttctagttatcatgtagtaagtgtcgattgtaacaaggaactgatgcctattaggacagatactactatttgtctaagtatagatcaaaagaaatcttacgtgtttaattttcacaagtatgaagaaaaatgttgtggtagaaccgtcattcatctagaatggttgttgggctttatcaagtgtattagtcagcatcagcatctggctattatgtttaaagatgacaatattattatgaagactcctggtaatactgatgcgttttccagggaatattctatgactgaatgttctcaagaactacaaaagttttctttcaaaatagctatctcgtctctcaacaaactacgaggattcaaaaagagagtcaatgtttttgaaactagaatcgtaatggataatgacgataacattttaggaatgttgttttcggatagagttcaatcctttaagatcaacatctttatggcgtttttagattaa

SEQ ID NO: 251 - DNA, 1023 bp, Vaccinia virus
  VACGL113
atgggtggcggagtaagtgttgagctccctaaacgggatccgcctccgggagtacccactgatgagatgttattaaacgtggataaaatgcatgacgtgatagctcccgctaagcttttagaatatgtgcatataggaccactagcaaaagataaagaggataaagtaaagaaaagatatccagagtttagattagtcaacacaggacccggtggtctttcggcattgttaagacaatcgtataatggaaccgcacccaattgctgtcgcacttttaatcgtactcattattggaagaaggatggaaagatatcagataagtatgaagagggtgcagtattagaatcgtgttggccagacgttcacgacactggaaaatgcgatgttgatttattcgactggtgtcagggggatacgttcgatagaaacatatgccatcagtggatcggttcagcctttaataggagtaatagaactgtagagggtcaacaatcgttaataaatctgtataataagatgcaaacattatgtagtaaagatgctagtgtaccaatatgcgaatcatttttgcattatttacgcgcacacaatacagaagatagcaaagagatgatcgattatattctaagacaacagtctgcggactttaaacagaaatatatgagatgtagttatcccactagagataagttagaagagtcattaaaatatgcggaacctcgagaatgttgggatccagagtgttcgaatgccaatgttaatttcttactaacacgtaattataataatttaggactttgcaatattgtacgatgtaataccagcgtgaacaacttacagatggataaaacttcctcattaagattgtcatgtggattaagcaatagtgatagattttctactgttcccgtcaatagagcaaaagtagttcaacataatattaaacactcgttcgacctaaaattgcatttgatcagtttattatctctcttggtaatatggatactaattgtagctatttaa

SEQ ID NO: 252 - DNA, 753 bp, Vaccinia virus
  VACGL114
atgggtgccgcggcaagcatacagacgacggtgaatacactcagcgaacgtatctcgtctaaattagaacaagaagcgaacgctagtgctcaaacaaaatgtgatatagaaatcggaaatttttatatccgacaaaaccatggatgtaacctcactgttaaaaatatgtgctctgcggacgcggatgctcagttggatgctgtgttatcagccgctacagaaacatatagtggattaacaccggaacaaaaagcatacgtgccagctatgtttactgctgcgttaaacattcagacgagtgtaaacactgttgttagagattttgaaaattatgtgaaacagacttgtaattctagcgcggtcgtcgataacaaattaaagatacaaaacgtaatcatagatgaatgttacggagccccaggatctccaacaaatttggaatttattaatacaggatctagcaaaggaaattgtgccattaaagcgttgatgcaattgacgactaaggccactactcaaatagcacctagacaagttgctggtacaggagttcagttttatatgattgttatcggtgttataatattggcagcgttgtttatgtactatgccaagcgtatgttgttcacatccaccaatgataaaatcaaacttattttagccaataaggaaaacgtccattggactacttacatggacacattctttagaacttctccgatggttattgctaccacggatatgcaaaactga

SEQ ID NO: 253 - DNA, 258 bp, Vaccinia virus
  VACGL115
atggaagttatcgctgatcgtctagacgatatagtgaaacaaaatatagcggatgaaaaatttgtagattttgttatacacggtctagagcatcaatgtcctgctatacttcgaccattaattaggttgtttattgatatactattatttgttatagtaatttatatttttacggtacgtctagtaagtagaaattatcaaatgttgttggtggtgctagtcatcacattaactattttttattactttatactataa

SEQ ID NO: 254 - DNA, 1053 bp, Vaccinia virus
  VACGL116
atgaatacccgtaccgatgttacaaacgataatatagacaaaaatccaaccaaacgaggtgatagaaatataccaggaagaaatgaaagatttaatgaccaaaatagattcaacaacgatagaccaaggcctaaaccaagaccacagcctaatcagccaccgagacaagataataaatgcagagaagagaatggagattttatcaatattagattgtgtgcctacgagaaggaatattgcaatgacggatatctatctcctgcctattatatgttaaaacaggtggatgatgaagaaatgagttgctggtcagaactatcgtcgttggtgagatccagaaaggcggtgggatttcctctattaaaggcggctaaacgtatttctcacggatcgatgctatattttgaacagttcaaaaacagtaaagttgtgagattaaccccgcaagttaaatgtttaaatgatactgttatttttcaaactgtagttattttatattccatgtataaacgtggcatatattctaacgaattttgttttgatctggtttctattcccagaacgaacattgttttttctgttaatcaattaatgtttaacatttgtacagacatattggtagttctatctatttgcggcaatcggctctatagaacaaatctaccacagtcgtgttacttaaatttcatacacggccatgagacaatagcccgtagaggatatgaacactccaattacttttttgagtggttgataaaaaatcacatatcgctattgaccaagcaaacgatggatattctcaaggtaaagaaaaagtatgctacaggagcaccagtaaataggttgttagaacctggtacactggtatatgtgcccaaagaagattattactttataggcatatcactcaccgatgtgtcaattagcgataatgtcagagtattattttccacagatggaatagtgttagaaatagaagactttaatatcaagcatttatttatggcaggtgagatgtttgttagaagtcagtctagtactattatagtataa

SEQ ID NO: 255 - DNA, 756 bp, Vaccinia virus
  VACGL117
atgagtctactgctagaaaacctcatcgaagaagataccatattttttgcaggaagtatatctgagtatgatgatttacaaatggttattgccggcgcaaaatccaaatttccaagatctatgctttctatttttaatatagtacctagaacgatgtcaaaatatgagttggagttgattcataacgaaaatatcacaggagcaatgtttaccacaatgtataatataagaaacaatttgggtctaggagatgataaactaactattgaagccattgaaaactatttcttggatcctaacaatgaagttatgcctcttattattaataatacggatatgactgccgtcattcctaaaaaaagtggtaggagaaagaataagaacatggttatcttccgtcaaggatcatcacctatcttgtgcattttcgaaactcgtaaaaagattaatatttataaagaaaatatggaatccgcgtcgactgagtatacacctatcggagacaacaaggctttgatatctaaatatgcgggaattaatgtcctgaatgtgtattctccttccacatccataagattgaatgccatttacggattcaccaataaaaataaactagagaaacttagtactaataaggaactagaatcgtatagttctagccctcttcaagaacccattaggttaaatgattttctgggactattggaatgtgttaaaaagaatattcctctaacagatattccgacaaaggattga

SEQ ID NO: 256 - DNA, 387 bp, Vaccinia virus
  VACGL118
atggagaatgttcctaatgtatactttaatcctgtgtttatagagcccacgtttaaacattctttattaagtgtttataaacacagattaatagttttatttgaagtattcgttgtattcattctaatatatgtattttttagatctgaattaaatatgttcttcatgcctaaacgaaaaatacccgatcctattgatagattacgacgtgctaatctagcgtgtgaagacgataaattaatgatctatggattaccatggatgacaactcaaacatctgcgttatcaataaatagtaaaccgatagtgtataaagattgtgcaaagcttttgcgatcaataaatggatcacaaccagtatctcttaacgatgttcttcgcagatga

SEQ ID NO: 257 - DNA, 462 bp, Vaccinia virus
  VACGL119
atggatcacaaccagtatctcttaacgatgttcttcgcagatgatgattcattttttaagtatttggctagtcaagatgatgaatcttcattatctgatatattgcaaatcactcaatatctagactttctgttattattattgatccaatcaaaaaataaattagaagctgtgggtcattgttatgaatctctttcagaggaatacagacaattgacaaaattcacagactttcaagattttaaaaaactgtttaacaaggtccctattgttacagatggaagggtcaaacttaataaaggatatttgttcgactttgtgattagtttgatgcgattcaaaaaagaatcctctctagctaccaccgcaatagatcctgttagatacatagatcctcgtcgtgatatcgcattttctaacgtgatggatatattaaagtcgaataaagtgaacaataattaa

SEQ ID NO: 258 - DNA, 276 bp, Vaccinia virus
  VACGL120
atgaacggcggacatattcagttgataatcggccccatgttttcaggtaaaagtacagaattaattagacgagttagacgttatcaaatagctcaatataaatgcgtgactataaaatattctaacgataatagatacggaacgggactatggacgcatgataagaataattttgaagcattggaagcaactaaactatgtgatgtcttggaatcaattacagatttctccgtgataggtatcgatgaaggacagttctttccagacattgtttaa

SEQ ID NO: 259 - DNA, 246 bp, Vaccinia virus
  VACGL121
atggcaaacgaaggaaaaatagttatagtagccgcactcgatgggacatttcaacgtaaaccgtttaataatattttgaatcttattccattatctgaaatggtggtaaaactaactgctgtgtgtatgaaatgctttaaggaggcttccttttctaaacgattgggtgaggaaaccgagatagagataataggaggtaatgatatgtatcaatcggtgtgtagaaagtgttacgtcggctcataa

SEQ ID NO: 260 - DNA, 1002 bp, Vaccinia virus
  VACGL122
atggatgttgtgtcgttagataaaccgtttatgtattttgaggaaattgataatgagttagattacgaaccagaaagtgcaaatgaggtcgcaaaaaaactgccgtatcaaggacagttaaaactattactaggagaattattttttcttagtaagttacagcgacacggtatattagatggtgccaccgtagtgtatataggatcggctcctggtacacatatacgttatttgagagatcatttctataatttaggagtgatcatcaaatggatgctaattgacggccgccatcatgatcctattttaaatggattgcgtgatgtaactctagtgactcggttcgttgatgaggaatatctacgatccatcaaaaaacaactgcatccttctaagattattttaatttctgatgtaagatccaaacgaggaggaaatgaacctagtacggcggatttactaagtaattacgctctacaaaatgtcatgattagtattttaaaccccgtggcgtctagtcttaaatggagatgcccgtttccagatcaatggatcaaggacttttatatcccacacggtaataaaatgttacaaccttttgctccttcatattcagctgaaatgagattattaagtatttataccggtgagaacatgagactgactcgagttaccaaattagacgctgtaaattatgaaaaaaagatgtactaccttaataagatcgtccgtaacaaagtagttgttaactttgattatcctaatcaggaatatgactattttcacatgtactttatgctgaggaccgtgtactgcaataaaacatttcctactactaaagcaaaggtactatttctacaacaatctatatttcgtttcttaaatattccaacaacatcaactgaaaaagttagtcatgaaccaatacaacgtaaaatatctagcaaaaattctatgtctaaaaacagaaatagcaagagatccgtacgcggtaataaatag

SEQ ID NO: 261 - DNA, 558 bp, Vaccinia virus
  VACGL123
atgaaccaatacaacgtaaaatatctagcaaaaattctatgtctaaaaacagaaatagcaagagatccgtacgcggtaataaatagaaacgtactactgagatatactaccgatatagagtataatgatttagttactttaataaccgttagacataaaattgattctatgaaaactgtgtttcaggtatttaacgaatcatccataaattatactccggttgatgatgattatggagaaccaatcattataacatcgtatcttcaaaaaggtcataacaagtttcctgtaaattttctatacatagatgtggtaatatctgacttatttcctagctttgttagactagatactacagaaactaatatagttaatagtgtactacaaacaggcgatggtaaaaagactcttcgtcttcccaaaatgttagagacggaaatagttgtcaagattctctatcgccctaatataccattaaaaattgttagatttttccgcaataacatggtaactggagtagagatagccgatagatctgttatttcagtcgctgattaa

SEQ ID NO: 262 - DNA, 402 bp, Vaccinia virus
  VACGL124
atgacggacgaacaaatttatgcattctgtgatgctaacaaagacgatatacgatgtaaatgtatttatcctgataaaagcatagtacggataggaatagatacaagattaccctattattgttggtacgagccatgtaaacgaagcgatgcgttgttaccagcctctttaaaaaaaaatataacaaaatgcaatgtatcggattgtaccatttcattgggaaacgtttccattacagatagtaaattagatgtaaataatgtttgtgattccaaacgagtagctaccgagaatatagctgtccgctatttaaatcaggaaattagataccctattatagatatcaaatggcttccgattggattactagcgttagctattttaatattagcatttttctaa

SEQ ID NO: 263 - DNA, 3861 bp, Vaccinia virus
  VACGL125
atggctgtaatctctaaggttacgtatagtctatatgatcaaaaagagattaatgctacagatattatcattagtcatgttaaaaatgacgacgatatcggtaccgttaaagatggtagactaggtgctatggatggggcattatgtaagacttgtgggaaaacggaattggaatgtttcggtcactggggtaaagtaagtatttataaaactcatatagttaagcctgaatttatttcagaaattattcgtttactgaatcatatatgtattcactgcggattattgcgttcacgagaaccgtattccgacgatattaacctaaaagagttatcgggacacgctcttaggagattaaaggataaaatattatccaagaaaaagtcatgttggaacagtgaatgtatgcaaccgtatcaaaaaattactttttcaaagaaaaaggtttgtttcgtcaacaagttggatgatattaacgttcctaattctctcatctatcaaaagttaatttctattcatgaaaagttttggccattattagaaattcatcaatatccagctaacttattttatacagactactttcccatccctccgttgattattagaccggctattagtttttggatagatagtatacccaaagagaccaatgaattaacttacttattaggtatgatcgttaagaattgtaacttgaatgctgatgaacaggttatccagaaggcggtaatagaatacgatgatattaaaattatttctaataacactaccagtatcaatttatcatatattacatccggcaaaaataatatgattagaagttatatcgtcgcccgacgaaaagatcagaccgctagatctgtaattggtcccagtacatctatcaccgttaatgaggtaggaatgcccgcatatattagaaatacacttacagaaaagatatttgttaatgcctttacagtggataaagttaaacaactattagcgtcaaaccaagttaaattttactttaataaacgattaaaccaattaacaagaatacgccaaggaaagtttattaaaaataaaatacatttattgcctggtgattgggtagaagtagctgttcaagaatatacaagtattatttttggaagacagccgtctctacatagatacaacgtcatcgcttcatctatcagagctaccgaaggagatactatcaaaatatctcccggaattgccaactctcaaaatgctgatttcgacggggatgaggaatggatgatattagaacaaaatcctaaagctgtaattgaacaaagtattcttatgtatccgacgacgttactcaaacacgatattcatggagcccccgtttatggatctattcaagatgaaatcgtagcagcgtattcattgtttaggatacaagatctttgtttagatgaagtattgaacatcttggggaaatatggaagagagttcgatcctaaaggtaaatgtaaattcagcggtaaagatatctatacttacttgataggtgaaaagattaattatccgggtctcttaaaggatggtgaaattattgcaaacgacgtagatagtaattttgttgtggctatgaggcatctgtcattggctggactcttatccgatcataagtcgaacgtggaaggtatcaactttattatcaagtcatcttatgtttttaagagatatctatctatttacggttttggggtgacattcaaagatctgagaccaaattcgacgttcactaataaattggaggccatcaacgtagaaaaaatagaacttatcaaagaagcatacgccaaatatctcaacgatgtaagagacgggaaaatagttccattatctaaagctttagaggcggactatgtggaatccatgttatccaacttgacaaatcttaatatccgagagatagaagaacatatgagacaaacgctgatagatgatccagataataacctcctgaaaatggccaaagcgggttataaagtaaatcccacagaactaatgtatattctaggtacgtatggacaacaaaggattgatggtgaaccagcagagactcgagtattgggtagagttttaccttactatcttccagactctaaggatccagaaggaagaggttacattcttaattctttaacaaaaggattaacgggttctcaatattacttttcgatgctggttgccagatctcaatctactgatatcgtctgtgaaacatcacgtaccggaacactggctagaaaaatcattaaaaagatggaggatatggtggtcgacggatacggacaagtagttataggtaatacgctcatcaagtacgccgccaattataccaaaattctaggctcagtatgtaaacctgtagatcttatctatccagatgagtccatgacttggtatttggaaattagtgctctgtggaataaaataaaacagggattcgtttactctcagaaacagaaacttgcaaagaagacattggcgccgtttaatttcctagtattcgtcaaacccaccactgaggataatgctattaaggttaaggatctgtacgatatgattcataacgtcattgatgatgtgagagagaaatacttctttacggtatctaatatagattttatggagtatatattcttgacgcatcttaatccttctagaattagaattacaaaagaaacggctatcactatctttgaaaagttctatgaaaaactcaattatactctaggtggtggaactcctattggaattatttctgcacaggtattgtctgagaagtttacacaacaagccctgtccagttttcacactactgaaaaaagtggtgccgtcaaacaaaaacttggtttcaacgagtttaataacttgactaatttgagtaagaataagaccgaaattatcactctggtatccgatgatatctctaaacttcaatctgttaagattaatttcgaatttgtatgtttgggagaattaaatccaaacatcactcttcgaaaagaaacagataaatatgtagtagatataatagtcaatagattatacatcaagagagcagaaataaccgaattagtcgtcgaatatatgattgaacgatttatctcctttagcgtcattgtaaaggaatggggtatggagacattcattgaggacgaggataatattagatttactgtctacctaaatttcgttgaaccggaagaattgaatcttagtaagtttatgatggttcttccgggggcagccaacaagggaaagattagtaaattcaagattcctatctctgattatacgggatatgacgacttcaatcaaacaaaaaagctcaataagatgactgtagaactcatgaatctaaaagaattgggttctttcgatttggaaaacgtcaacgtgtatcctggagtatggaatacatacgatatcttcggtatcgaggccgctcgtgaatacttgtgcgaagccatgttaaacacctatggagaagggttcgattatctgtatcagccttgtgatcttctcgctagtttactatgtgctagttacgaaccagaatcagtgaataaattcaagttcggcgcagctagtactcttaagagagctacgttcggagacaataaagcattgttaaacgcggctcttcataaaaagtcagaacctattaacgataatagtagctgccacttttttagcaaggtccctaatataggaactggatattacaaatactttatcgacttgggtcttctcatgagaatggaaaggaaactatctgataagatatcttctcaaaagatcaaggaaatggaagaaacagaagacttttaa

SEQ ID NO: 264 - DNA, 516 bp, Vaccinia virus
  VACGL127
atggataagaaaagtttgtataaatacttactactacgttcaactggagatatgcacaaagccaaatctcccactataatgacaagggtaaccaataatgtgtatttgggaaattataaaaatgctatggatgcaccatcatctgaagttaagttcaaatatgttttaaatttgacgatggataaatatacattacctaactctaatattaatattattcatataccgttggtagatgatacaactaccgatattagtaaatattttgacgacgtaaccgcctttttatctaaatgtgatcaacgaaacgagcccgtgttggttcattgtgctgcgggagtaaatagaagcggggctatgattttggcatatctaatgtctaaaaataaggagtcattgcctatgctatattttttatacgtgtatcattctatgagggacttgagaggcgcatttgtggaaaatccatcgtttaaaagacagatcatagaaaaatatgttattgataagaattaa

SEQ ID NO: 265 - DNA, 570 bp, Vaccinia virus
  VACGL128
atggataaaactactttatcggtaaacgcgtgtaatttagaatacgttagagaaaaggctatagtaggcgtacaagcagccaaaacatcaacacttatattctttgttattatattggcaattagtgcgctattactctggtttcagacgtctgataatccagtctttaatgaattaacgagatatatgcgaattaaaaatacggttaacgattggaaatcattaacggatagcaaaacaaaattagaaagtgatagaggtagacttctagccgctggtaaggatgatatatttgaattcaaatgtgtggatttcggcgcctattttatagctatgcgattggataagaaaacatatctgccgcaagctattaggcgaggtactggagacgcgtggatggttaaaaaggcggcaaaggtcgatccatctgctcaacaattttgtcagtatttgataaaacacaagtctaataatgttattacttgtggtaatgagatgttaaatgaattaggttatagcggttattttatgtcaccgcattggtgttccgattttagtaatatggaatag

SEQ ID NO: 266 - DNA, 975 bp, Vaccinia virus
  VACGL129
atggcggcggtgaaaactcctgttattgttgtgccagttattgatagacctccatcagaaacatttcctaatgttcatgagcatattaatgatcagaagttcgatgatgtaaaggacaacgaagttatgccagaaaaaagaaatgttgtggtagtcaaggatgatccagatcattacaaggattatgcgtttatacagtggactggaggaaacattagaaatgatgacaagtatactcacttcttttcagggttttgtaacactatgtgtacagaggaaacgaaaagaaatatcgctagacatttagccctatgggattctaatttttttaccgagttagaaaataaaaaggtagaatatgtagttattgtagaaaacgataacgttattgaggatattacgtttcttcgtcccgtcttgaaggcaatgcatgacaaaaaaatagatatcctacagatgagagaaattattacaggcaataaagttaaaaccgagcttgtaatggacaaaaatcatgccatattcacatatacaggagggtatgatgttagcttatcagcctatattattagagttactacggcgctgaacatcgtagatgaaattataaagtctggaggtctatcatcgggattttattttgaaatagccagaatcgaaaacgaaatgaagatcaataggcagatactggataatgccgccaaatatgtagaacacgatcctcgacttgttgcagaataccgtttcgaaaacatgaaaccgaatttttggtctagaataggaacggcagctgctaaacgttatccaggagttatgtacgcgtttactactccactgatttcattttttggattgtttgatattaatgttataagtttgattgtaattttgtttattatgtttatgctcatctttaacgttaaatctaagctgttatggttccttacaggaacattcgttaccgcatttatctaa

SEQ ID NO: 267 - DNA, 2388 bp, Vaccinia virus
  VACGL130
atggactctaaagagactattctaattgagatcattccaaaaataaaagcatatctactagacgcgaatataagtccaaaatcctacgatgactttatttcacgaaataaaaatattttcgttatcaacctttataacgtatcgactatcacagaagaagatatacgattgttatacactacgatagaacagaatattgacgcggatgatcaaacactggttgctattttttcgtatataggatataaatttgaacaggctgttaaagaagagattagtacgagtttatccttcaatgacaagaataccacagatgaaatgacgtataacttgtatgatcttttttttaacacattagacatgtatttacgacaaaagaagatcagtattctggtaaatgatgatgttagaggtgatgtaatcgttagttataaaaatagtgacttagtttcatcatttaatgcggaactagaaccagagattaagaagataccgttcaatatgaaaaatctattaccgtacttggaaaagaatttggaccaactaagattctctaaaaaatatttagactttgcatatttatgtagacacatcggtattcccatttccaaaaaaaagtataatgtgcgatatgtatttctttataaaatagacggattatccattcctattatcattaaggattttttagatgttaagtacgtatatttggaaaatactggaaaaatttataaaaattctttttccgaagaccataacaacagtctatctgattggggtaaagttattatacctctcttaaaggatcgtcatctatatagctacatctttctatctagttatcatttacatagttactatacagatctcatcgcgagagacgagcctgtgtttgtgaaacgcaaaaaactagatattatagagatcgatgaacctgaggcatggaaaagggatgttagagtggaattcgcaccgtgtgagcatcaaattagattgaaggaagctatgaaagttgacgctaactatttcactaaaattaataattttgctaacgaatttatttattatgaagatggtgtggcatattgtagagtgtgtggaataaatatacctatatttaatttagatgccgctgacgtgattaaaaatacagttatcgtttccacgtttaacaagactatattcttgagcgaaccatatagctatttcgttcatagtcagcgctttatctttaatattatcatgtcttttgataatattatgaaatctcaaacttgggtaatgaaatacaacattaaccgactaattcttaactttcttattgatataaactctagacgtcaggaatacgaaaaaaagttttcttctgaaattaagagaggtctgttctttcttcgtttgtctgcaaacttattcgaaagtcaagtatcgtctacagagttattttatgtttccaaaatgcttaatttaaactatatagttgcgttagtaatcattcttaacagtagtgcggactttatagtttcctatatgacatccaagaacaaaacggtagaagaatccactcttaaatacgccatctccgtggttatatacgattttttggttaagactagaatttgcgagaagggatcgttggatactatagttttatttaccgatgtatacacatctataatgccggaggaattggatttacattttcagagaatcacattagaacttagaaaactagtatccattcagagatcggcgttagaacccaattacgacgtagaaagtcgcggcgaagagcttccgctatctgcattaaagtttttcgatacaagcaccattatagttaaaacaatggctccagtacatacatgtgtagaacaaaaaattgttgcacctactccatctgtagaaccaactgatgcatctcttaaaaacttcaaagagctaacgtgtgacgaagatattaagattttgattagagttcatgatactaatgctacaaaattagtcatttttccatcacatctaaaaatagaaattgagagaaaaaaactaattataccgctaaagagtttatatattaccaatactctcaaatattattattctaactcctatttatacgttttcagattcggagatcctatgccattcgaagaagaactcatagatcacgaacatgtgcaatacaaaataaattgttacaatattctaagatatcatttattgccagacagtgacgtgtttgtatattttagtaattcattaaacagagaagcattggaatacgcattttatatctttttgtcgaaatatgtcaatgtgaaacaatggatagacgaaaatataactcgtattaaagagttgtatatgattaatttcaataactaa

SEQ ID NO: 268 - DNA, 612 bp, Vaccinia virus
  VACGL131
atggcgtggtcaattacgaataaagcggatactagtagcttcacaaagatggctgaaatcagagctcatctaaaaaatagcgctgaaaataaagataaaaacgaggatattttcccggaagatgtaataattccatctactaagcccaaaaccaaacgagccactactcctcgtaaaccagcggctactaaaagatcaaccaaaaaggaggaagtggaagaagaagtagttatagaggaatatcatcaaacaactgaaaaaaattctccatctcctggagtcagcgacattgtagaaagcgtggccgctgtagagctcgatgatagcgacggggatgatgaacctatggtacaagttgaagctggtaaagtaaatcatagtgctagaagcgatctctctgacctaaaggtggctaccgacaatatcgttaaagatcttaagaaaattattactagaatctctgcagtatcgacggttctagaggatgttcaagcagctggtatctctagacaatttacttctatgactaaagctattacaacactatctgatctagtcaccgagggaaaatctaaagttgttcgtaaaaaagttaaaacttgtaagaagtaa

SEQ ID NO: 269 - DNA, 945 bp, Vaccinia virus
  VACGL132
atgcgtgcacttttttataaagatggtaaactctttaccgataataattttttaaatcctgtatcagacgataatccagcgtatgaggttttgcaacatgttaaaattcctactcatttaacagatgtagtagtatatgaacaaacgtgggaggaggcgttaactagattaatttttgtgggaagtgattcaaaaggacgtagacaatacttttacggaaaaatgcatgtacagaatcgcaacgctaaaagagatcgtatttttgttagagtatataacgttatgaaacgaattaattgttttataaacaaaaatataaagaaatcgtccacagattccaattatcagttggcggtttttatgttaatggaaactatgttttttattagatttggtaaaatgaaatatcttaaggagaatgaaacagtagggttattaacactaaaaaataaacacatagaaataagtcccgatgaaatagttatcaagtttgtaggaaaggacaaagtttcacatgaatttgttgttcataagtctaatagactatataaaccgctattgaaactgacggatgattctagtcccgaagaatttctgttcaacaaactaagtgaacgaaaggtatacgaatgtatcaaacagtttggtattagaatcaaggatctccgaacgtatggagtcaattatacgtttttatataatttttggacaaatgtaaagtccatatctcctcttccgtcaccaaaaaagttaatagcattaactatcaaacaaactgctgaagtggtaggtcatactccatcaatttcaaaaagagcttatatggcaacgactattttagaaatggtaaaggataaaaattttttagatgtagtatctaaaactacgttcgatgaattcctatctatagtcgtagatcacgttaaatcatctacggatggatga

SEQ ID NO: 270 - DNA, 183 bp, Vaccinia virus
  VACGL133
atggtattgtttggatggcgtttaaatatagacattatcaatgccataatatctaatgtgcttagctctccgaagaaagctgtcattgcgagagatttcatacgcttatccatttccatttatcggtcttgtaattatttgtgtaaagatctatatcatccatccgtagatgatttaacgtga

SEQ ID NO: 271 - DNA, 441 bp, Vaccinia virus
  VACGL134
atggaaatggataagcgtatgaaatctctcgcaatgacagctttcttcggagagctaagcacattagatattatggcattgataatgtctatatttaaacgccatccaaacaataccattttttcagtggataaggatggtcagtttatgattgatttcgaatacgataattataaggcttctcaatatttggatctgaccctcactccgatatctggagatgaatgcaagactcacgcatcgagtatagccgaacaattggcgtgtgcggatattattaaagaggatattagcgaatatatcaaaactactccccgtcttaaacgatttataaaaaaataccgcaatagatcagatactcgtatcagtcgagatacagaaaagcttaaaatagctctagctaaaggcatagattacgaatatataaaagacgcttgttaa

SEQ ID NO: 272 - DNA, 2535 bp, Vaccinia virus
  VACGL135
atggatgccaacgtagtatcattttctactattgcgacgtatatagacgctttagcgaagaatgcttcggaattagaacagaggtctaccgcatacgaaataaataatgaattggaactagtatttattaagccgccattgattactttgacaaatgtagtgaatatctctacgattcaggaatcgtttattcgatttaccgttactaataaggaaggtgttaaaattagaactaagattccattatctaaggtacatggtctagatgtaaaaaatgtacagttagtagatgctatagataacatagtttgggaaaagaaatcattagtgacggaaaatcgtcttcacaaagaatgcttgttgagactatcgacagaggaacgtcatatatttttggattacaagaaatatggatcctctatccgactagaattagtcaatcttattcaagcaaaaacaaaaaactttacgatagactttaagctaaaatattttctaggatccggtgcccagtctaaaagttctttgttgcacgctattaatcatccaaagtcaaggcctaatacatctctggaaatagaattcacacctagagacaatgaaacagttccatatgatgaactaataaaggaattgacgactctctcgcgtcatatatttatggcttctccagagaatgtaattctttctccgcctattaacgcgcctataaaaacctttatgttgcctaaacaagatatagtaggtttggatctggaaaatctatatgccgtaactaagactgacggcattcctataactatcagagttacatcaaacgggttgtattgttattttacacatcttggttatattattagatatcctgttaagagaataatagattccgaagtagtagtctttggtgaggcagttaaggataagaactggaccgtatatctcattaagctaatagagcctgtgaatgcaatcaatgatagactagaagaaagtaagtatgttgaatctaaactagtggatatttgtgatcggatagtattcaagtcaaagaaatacgaaggtccgtttactacaactagtgaagtcgtcgatatgttatctacatatttaccaaagcaaccagaaggtgttattctgttctattcaaagggacctaaatctaacattgattttaaaattaaaaaggaaaatactatagaccaaactgcaaatgtagtatttaggtacatgtccagtgaaccaattatctttggagaatcgtctatctttgtagagtataagaaatttagcaacgataaaggctttcctaaagaatatggttctggtaagattgtgttatataacggcgttaattatctaaataatatctattgtttggaatatattaatacacataatgaagtgggtattaagtccgtggttgtacctattaagtttatagcagaattcttagttaatggagaaatacttaaacctagaattgataaaaccatgaaatatattaactcagaagattattatggaaatcaacataatatcatagtcgaacatttaagagatcaaagcatcaaaataggagatatctttaacgaggataaactatcggatgtgggacatcaatacgccaataatgataaatttagattaaatccagaagttagttattttacgaataaacgaactagaggaccgttgggaattttatcaaactacgtcaagactcttcttatttctatgtattgttccaaaacatttttagacgattccaacaaacgaaaggtattggcgattgattttggaaacggtgctgacctggaaaaatacttttatggagagattgcgttattggtagcgacggatccggatgctgatgctatagctagaggaaatgaaagatacaacaaattaaactctggaattaaaaccaagtactacaaatttgactacattcaggaaactattcgatccgatacatttgtctctagtgtcagagaagtattctattttggaaagtttaatatcatcgactggcagtttgctatccattattcttttcatccgagacattatgctaccgtcatgaataacttatccgaactaactgcttctggaggcaaggtattaatcactaccatggacggagacaaattatcaaaattaacagataaaaagacttttataattcataagaatttacctagtagcgaaaactatatgtctgtagaaaaaatagctgatgatagaatagtggtatataatccatcaacaatgtctactccaatgactgaatacattatcaaaaagaacgatatagtcagagtgtttaacgaatacggatttgttcttgtagataacgttgatttcgctacaattatagaacgaagtaaaaagtttattaatggcgcatctacaatggaagatagaccgtctacaaaaaactttttcgaactaaatagaggagccattaaatgtgaaggtttagatgtcgaagacttacttagttactatgttgtttatgtcttttctaagcggtaa

SEQ ID NO: 273 - DNA, 441 bp, Vaccinia virus
  VACGL137
atgtccatcaatatcgatataaaaaaaataactgatttactcaacagtagtattttattcccagatgatgtgcaagaacttcttcgagagaaatatatagtattagaaagaaaatcaaatggtacacctacagtagctcacatctataagacaatggctagatttgataataagagtatatatagaatcgccaagtttttatttatgaacaggccagatgttataaaacttttatttttagaagacgtagaacctctgttacccgacaaaagtattaatatatctattaacaatacagagtatccacagttggaaggtcctataggaacaaaaatcgctctattggaattatttaatgcatttagaactgggagatcagaacccataccatattattatttaccgcttagaaaagacataaacaacatagtaactaagtaa

SEQ ID NO: 274 - DNA, 714 bp, Vaccinia virus
  VACGL139
atggacatttttatagttaaggataataagtatcccaaagtcgataacgacgataacgaagtatttatacttttaggaaatcacaatgactttatcagattaaaattaacaaaattaaaggagcatgtatttttttctgaatatattgtgactccagatacatatggatctttatgcgtcgaattaaatgggtctagttttcagcacggcggtagatatatagaggtggaggaatttatagatgctggaagacaagttagatggtgttctacatccaatcatatatctaaagatatacccgaagatatgcacactgataaatttgtcatttatgatatttatacgtttgattcgttcaagaataaacgattggtattcgtacaggtacctccgtcgttaggagatgatagtcatttgactaatccgttattgtcaccgtattatcgtaattcagtagccagacaaatggtcaatgatatgatttttaatcaagattcatttttaaaatatttattagaacatctgattagaagccactatagagtttctaaacatataacaatagttagatacaaggataccgaagaattaaatctaacgagaatatgttataatagagataagtttaaggcgtttgtattcgcttggtttaacggcgtttcggaaaatgaaaaggtactagatacgtataaaaaggtatctaatttgatataa

SEQ ID NO: 275 - DNA, 657 bp, Vaccinia virus
  VACGL140
atgaattcagtgactgtatcacacgcgccatatactattacttatcacgatgattgggaaccagtaatgagtcaattggtagagttttataacgaagtagccagttggctgctacgagacgagacgtcgcctattcctgataagttctttatacagttgaaacaaccgcttagaaataaacgagtatgtgtgtgtggtatagatccgtatccgaaagatggaactggtgtaccgttcgaatcaccaaattttacaaaaaaatcaattaaggagatagcttcatctatatctagattaaccggagtaattgattataaaggttataaccttaatataatagacggggttataccctggaattattacttaagttgtaaattaggagaaacaaaaagtcacgcgatttactgggataagatttccaagttactgctgcagcatataactaaacacgttagtgttctttattgtttgggtaaaacagatttctcgaatatacgggccaagttagaatccccggtaactaccatagtcggatatcatccagcggctagagaccgccaattcgagaaagatagatcatttgaaattatcaacgttttactggaattagacaacaaggcacctataaattgggctcaagggtttatttattaa

SEQ ID NO: 276 - DNA, 210 bp, Vaccinia virus
  VACGL141
atgaaaattctgactatagagtatgcttcctcatccctaagactttcgaatagtgtacattctggattattctcaatatatctttctaactcgtcgcatttaaatgcttctacaaatcttggatcttcattttgtctgcacgctgacgggacacctatagtcttaagaacaaagataacatcattacctctaatagccgcatccatttag

SEQ ID NO: 277 - DNA, 2358 bp, Vaccinia virus
  VACGL142
atggatgcggctattagaggtaatgatgttatctttgttcttaagactataggtgtcccgtcagcgtgcagacaaaatgaagatccaagatttgtagaagcatttaaatgcgacgagttagaaagatatattgagaataatccagaatgtacactattcgaaagtcttagggatgaggaagcatactctatagtcagaattttcatggatgtagatttagacgcgtgtctagacgaaatagattatttaacggccattcaagattttattatcgaggtgtcaaactgtgtagctagattcgcgtttacagaatgcggcgccattcatgaaaatgtaataaaatccatgagatctaatttttcattgactaagtctacaaatagagataaaacaagttttcatattatctttttagatacgtataccactatggatacattgatagctatgaaacgaacactattagaattaagtagatcatctgaaaatccactaaccagatcgatagacactgccgtatataggagaaaaacaactcttcgggttgtaggtactaggaaaaatccaaattgcgacactattcatgtaatgcaaccaccgcatgataatatagaagattacctattcacttacgtggatatgaacaacaatagttattacttttctctacaacaacgattggaggatttagttcctgataagttatgggaaccagggtttatttcattcgaagacgctataaaaagagtttcaaaaatattcattaattctataataaactttaatgatctcgatgaaaataattttacaacggtaccactggtcatagattacgtaacaccttgtgcattatgtaaaaaacgatcgcataaacatccgcatcaactatcgttggaaaatggtgctattagaatttacaaaactggtaatccacatagttgtaaagttaaaattgttccgttggatggtaataaactgtttaatattgcacaaagaattttagacactaactctgttttattaaccgaacgaggagaccatatagtttggattaataattcatggaaatttaacagcgaagaacccttgataacaaaactaattttgtcaataagacatcaactacctaaggaatattcaagcgaattactctgtccaagaaaacgaaagactgtagaagctaacatacgagacatgttagtagattcagtggagaccgatacctatccggataaacttccgtttaaaaatggtgtattggacctggtagacggaatgttttactctggagatgatgctaaaaaatatacgtgtactgtatcaaccggatttaaatttgacgatacaaagttcgtcgaagacagtccagaaatggaagagttaatgaatatcattaacgatatccaaccattaacggatgaaaataagaaaaatagagagctatatgaaaaaacattatctagttgtttatgcggtgctaccaaaggatgtttaacattcttttttggagaaactgcaactggaaagtcgacaaccaaacgtttgttaaagtctgctatcggtgacctgtttgttgagacgggtcaaacaattttaacagatgtattggataaaggacctaatccatttatcgctaacatgcatttgaaaagatctgtattctgtagcgaactacctgattttgcctgtagtggatcaaagaaaattagatctgacaatattaaaaagttgacagaaccttgtgtcattggaagaccgtgtttctccaataaaattaataatagaaaccatgcgacaatcattatcgatactaattacaaacctgtttttgataggatagataacgcattaatgagaagaattgccgtcgtgcgattcagaacacacttttctcaaccttctggtagagaggctgctgaaaataatgacgcgtacgataaagtcaaactattagacgaggggttagatggtaaaatacaaaataatatatatagatttgcatttctatacttgttggtgaaatggtacaaaaaatatcatgttcctattatgaaactatatcctacacccgaagagattcctgactttgcattctatctcaaaataggtactctgttggtatctagctctgtaaagcatattccattaatgacggacctctccaaaaagggatatatattgtacgataatgtggtcactcttccgttgactactttccaacagaaaatatccaagtattttaattctagactatttggacacgatatagagagcttcatcaatagacataagaaatttgccaatgttagtgatgaatatctgcaatatatattcatagaggatatttcatctccgtaa

SEQ ID NO: 278 - DNA, 1914 bp, Vaccinia virus
  VACGL145
atgaataccggaatcatagatttatttgataatcatgttgatagtataccaactatattacctcatcagttagctactctagattatctagttagaactatcatagatgagaacagaagcgtgttattgttccatattatgggatcaggtaaaacaataatcgctttgttgttcgccttggtagcttccagatttaaaaaggtttacattctagtgccgaacatcaacatcttaaaaattttcaattataatatgggtgtagctatgaacttgtttaatgacgaattcatagctgagaatatctttattcattccacaacaagtttttattctcttaattataacgataacgtcattaattataacggattatctcgctacaataactctatttttatcgttgatgaggcacataatatctttgggaataatactggagaacttatgaccgtgataaaaaataaaaacaagattccttttttactattgtctggatctcccattactaacacacctaatactctgggtcatattatagatttaatgtccgaagagacgatagattttggtgaaattattagtcgtggtaagaaagtaattcagacacttcttaacgaacgcggtgtgaatgtacttaaggatttgcttaaaggaagaatatcatattacgaaatgcctgataaagatctaccaacgataagatatcacggacgtaagtttctagatactagagtagtatattgtcacatgtctaaacttcaagagagagattatatgattactagacgacagctatgttatcatgaaatgtttgataaaaatatgtataacgtgtcaatggcagtattgggacaacttaatctgatgaataatttagatactttatttcaggaacaggataaggaattgtacccaaatctgaaaataaataatggcgtgttatacggagaagaattggtaacgttaaacattagttccaaatttaaatactttattaatcggatacagacactcaacggaaaacattttatatacttttctaattctacatatggcggattggtaattaaatatatcatgctcagtaatggatattctgaatataatggttctcagggaactaatccacatatgataaacggcaaaccaaaaacatttgctatcgttactagtaaaatgaaatcgtctttagaggatctattagatgtgtataattctcctgaaaacgatgatggtagtcaattgatgtttttgttttcatcaaacattatgtccgaatcctatactctaaaagaggtaaggcatatttggtttatgactatcccagatactttttctcaatacaaccaaattcttggacgatctattagaaaattctcttacgccgatatttctgaaccagttaatgtatatcttttagccgccgtatattccgatttcaatgacgaagtgacgtcattaaacgattacacacaggatgaattaattaatgttttaccatttgacatcaaaaagctgttgtatctaaaatttaagacgaaagaaacgaatagaatatactctattcttcaagagatgtctgaaacgtattctcttccaccacatccatcaattgtaaaagttttattgggagaattggtcagacaatttttttataataattctcgtattaagtataacgataccaagttacttaaaatggttacatcagttataaaaaataaagaagacgctaggaattacatagatgatattgtaaacggtcacttctttgtatcgaataaagtatttgataaatctcttttatacaaatacgaaaacgatattattacagtaccgtttagactttcctacgaaccatttgtttggggagttaactttcgtaaagaatataacgtggtatcttctccataa

SEQ ID NO: 279 - DNA, 486 bp, Vaccinia virus
  VACGL147
atgtcgagctttgttaccaatggatacctttccgttacattggaaccacacgagctgacgttagacataaaaactaatattaggaatgccgtatataagacgtatctccatagagaaattagtggtaaaatggccaagaaaatagaaattcgtgaagacgtggaattacctctcggcgaaatagttaataattctgtagttataaacgttccgtgtgtaataacctacgcgtattatcacgttggggatatagtcagaggaacattaaacatcgaagatgaatcaaatgtaactattcaatgtggagatttaatctgtaaactaagtagagattcgggtactgtatcatttagcgattcaaagtactgcttttttcgaaatggtaatgcgtatgacaatggcagcgaagtcactgccgttctaatggaggctcaacaaggtatcgaatctagttttgtttttctcgcgaatatcgtcgactcataa

SEQ ID NO: 280 - DNA, 915 bp, Vaccinia virus
  VACGL148
atgccgcaacaactatctcctattaatatagaaactaaaaaagcaatttctaacgcgcgattgaagccgttagacatacattataatgagtcgaaaccaaccactatccagaacactggaaaactagtaaggattaattttaaaggaggatatataagtggagggtttctccccaatgaatatgtgttatcatcactacatatatattggggaaaggaagacgattatggatccaatcacttgatagatgtgtacaaatactctggagagattaatcttgttcattggaataagaaaaaatatagttcttatgaagaggcaaaaaaacacgatgatggacttatcattatttctatattcttacaagtattggatcataaaaatgtatattttcaaaagatagttaatcaattggattccattagatccgccaatacgtctgcaccgtttgattcagtattttatctagacaatttgctgcctagtaagttggattattttacatatctaggaacaactatcaaccactctgcagacgctgtatggataatttttccaacgccaataaacattcattctgatcaactatctaaatttagaacactattgtcgtcgtctaatcatgagggcaaaccgcattatataacagagaactatagaaatccgtataaattgaacgacgacacgcaagtatattattctggagagattatacgagcggcaactacctctccagcgcgcgagaactattttatgagatggttgtccgatttgagagagacatgtttttcatattatcaaaaatatatcgaagagaataaaacattcgcaattattgccatagtattcgtgtttatacttaccgctattctcttttttatgagtcgacgatattcgcgagaaaaacaaaactag

SEQ ID NO: 281 - DNA, 642 bp, Vaccinia virus
  VACGL149
atgggaattacaatggatgaggaagtgatatttgaaactcctagagaattaatatctattaaacgaataaaagatattccaagatcaaaagacacgcatgtgtttgctgcgtgtataacaagtgacggatatccgttaataggagctagaagaacttcattcgcgttccaggcgatattatctcaacaaaattcagattctatctttagagtatccactaaactattacggtttatgtactacaatgaactaagagaaatctttagacggttgagaaaaggttctatcaacaatatcgatcctcactttgaagagttaatattattgggtggtaaactagataaaaaggaatctattaaagattgtttaagaagagaattaaaagaggaaagtgatgaacgtataacagtaaaagaatttggaaatgtaattctaaaacttacaacacgggataaattatttaataaagtatatataagttattgcatggcgtgttttattaatcaatcgttggaggatttatcgcatactagtatttacaatgtagaaattagaaagattaaatcattaaatgattgtattaacgacgataaatacgaatatctgtcttatatttataatatgctagttaatagtaaatga

SEQ ID NO: 282 - DNA, 747 bp, Vaccinia virus
  VACGL150
atgaacttttacagatctagtataattagtcagattattaagtataatagacgactagctaagtctattatttgcgaggatgactctcaaattattacactcacggcattcgttaaccaatgcctatggtgtcataaacgagtatccgtgtccgctattttattaactactgataacaaaatattagtatgtaacagacgagatagttttctctattctgaaataattagaactagaaacatgtttagaaagaaacgattatttctgaattattccaattatttgaacaaacaggaaagaagtatactatcgtcatttttttctctagatccagctactactgataatgatagaatagacgctatttatccgggtggcatacccaaaaggggtgagaatgttccagagtgtttatccagggaaattaaagaagaagttaatatagacaattcttttgtattcatagacactcggttttttattcatggcatcatagaagataccattattaataaattttttgaggtaatcttctttgtcggaagaatatctctaacgagtgatcaaatcattgatacatttaaaagtaatcatgaaatcaaggatctaatatttttagatccgaattcaggtaatggactccaatacgaaattgcaaaatatgctctagatactgcaaaacttaaatgttacggccatagaggatgttattatgaatcattaaaaaaattaactgaggatgattga

SEQ ID NO: 283 - DNA, 1896 bp, Vaccinia virus
  VACGL151
atgagtaaatcacacgcggcctatatcgattatgccttacgcagaactactaatatgcccgttgaaatgatggggtcggacgtagtacgcctcaaggattatcaacattttgtagcaagagttttcttaggattagacagtatgcattctcttttattgttccatgaaacgggtgtcggtaaaacaatgactactgtatatattctcaaacatcttaaggatatttatacgaattgggctattatcttattggtgaaaaaggctttgatagaagatccttggatgaacactatactcagatacgctccagagataacgaaggattgtatttttattaattacgatgatcaaaattttagaaataaattttttactaatatcaaaactattaattccaagagtagaatatgcgtcattattgatgaatgtcataacttcatttctaaatcattaatcaaagaagatggtaagatccgtcctactcgttcagtatataattttttatctaagaccattgcgttaaaaaaccataagatgatttgtttatcggctacacctatcgtcaatagtgtgcaagaattcaccatgttggttaacttactacgaccaggatccttacaacaccaatcgctatttgagaataaacgtctagtcgatgaaaaagaattagtctccaaactaggaggactatgttcgtatatagttaataacgagttttctatttttgatgacgtagaagggtctgcatcattcgctaagaaaacagtattaatgcgatacgttaatatgtcgaaaaagcaagaagaaatttatcaaaaggctaaactcgctgaaataaaaacaggtatatcatcatttagaattctgagacgtatggctactacgtttacgttcgatagctttcctgaaagacaaaatcgtgatccgggcgaatacgcgcaagagatagcaacactatataatgattttaaaaattcattaagagatagagagttttctaaatccgcattagatacctttaaaaagggagaactattgaaaggggatgctagtgcggctgatatctctctatttactgaattaaaagagaaaagcgtcaaatttatagatgtatgtttgggaatattagcatcccatggtaaatgtctagtctttgaaccatttgttaatcagtcaggaatagaaatcttattactatatttcaaagtctttggtatctctaatatagagttctcatctagaacaaaagatactagaatcaaggcggtggctgagtttaaccaagaatcaaacactaacggagaatgcattaaaacatgcgtattctcttctagtggaggcgagggtattagttttttctcaattaatgatatcttcattttagatatgacatggaacgaggcgtctcttcgtcagatagtaggaagagccattcgtctcaatagtcacgttcttactcctccagaacgtagatatgtaaacgtgcactttataatggctagattatctaatggtatgcctactgtagacgaagacctatttgaaatcattcaaagcaaatcaaaagaatttgtccaattgtttagagtgtttaaacatacatcattagaatggattcatgctaatgaaaaagacttctcaccgatcgacaatgagtccggttggaaaaccttggtttcaagagccatcgatctatcgtctaaaaaaaatattaccaataaactaattgagggtactaatatttggtattccaattctaatagattaatgtcaataaatagaggatttaaaggcgtagatggtcgagtatacgatgtagacggtaactatctacatgatatgccggacaatcccgttataaaaatacacgatggtaaattaatttatattttttaa

SEQ ID NO: 284 - DNA, 864 bp, Vaccinia virus
  VACGL155
atggatgaaattgtaaaaaatatccgggagggaacgcatgtccttcttccattttatgaaacattgccagaacttaatctgtctctaggtaaaagcccattacctagtctggaatacggagctaattactttcttcagatttctagagttaatgatctaaatagaatgccgaccgacatgttaaaactttttacacatgatatcatgttaccagaaagcgatctagataaagtctatgaaattttaaagattaatagcgtaaagtattatgggaggagtactaaagcggacgccgtagttgccgacctcagcgcacgcaataaactgttcaaacgtgaacgagatgctattaaatctaataatcatctcactgaaaacaatctatacattagcgattataagatgttaaccttcgacgtgtttcgaccattatttgattttgtaaacgaaaaatattgtattattaaacttccaactttattcggtagaggtgtaatcgatactatgagaatatattgtagtctctttaaaaatgttagactgctaaaatgcgtaagcgatagctggttgaaagatagcgccattatggtggctagtgatgtttgtaaaaaaaatttggatttatttatgtctcatgttaagtccgtcactaagtcttcttcttggaaggatgtgaacagtgttcaatttagtattttaaacaatccagtggatacggaattcattaataagttcttagagttttcgaatagagtatacgaagctctctattacgttcactcgttgctttattctagtatgacttctgattcaaaaagtatcgaaaacaaacatcagagaagactagttaaactactgctgtga

SEQ ID NO: 285 - DNA, 219 bp, Vaccinia virus
  VACGL157
atgcgttccctcccggatattttttacaatttcatccatttacaactctatagtttgttttcattattattagttattatctcccataatcttggtaatacttaccccttgatcgtaagataccttatacaggtcattacatacaactaccaattgtttttgtacataatagattggatggttgacatccatggtggaataaactactcgaacagatag

SEQ ID NO: 286 - DNA, 1656 bp, Vaccinia virus
  VACGL158
atgaataatactatcattaattctttgatcggtggggatgactctattaaacggtctaatgtcttcgcagtcgatagtcaaattccaactttgtatatgccgcaatatatttctctatccggagttatgacaaacgatggtccagacaatcaggctatcgctagcttcgaaattagggatcagtatattactgcgcttaatcatttggttctgagtttggaacttccagaagttaaaggtatgggaagattcagttacgtaccatatgttggatataaatgtattaatcacgtatctatctcttcgtgtaacggtgttatttgggaaattgagggcgaagaattatataataattgtatcaataatacaattgctttgaaacactctggatattctagtgaacttaatgatatttctattggcctaactcctaatgacactattaaagaaccatctacagtatacgtttatattaaaactccgtttgatgtggaagatacattcagcagtcttaaactatccgattcaaaaattaccgtaacggtaaccttcaatccagtatccgatatcgttattcgtgactcttcgttcgactttgaaacgttcaacaaagaatttgtttatgttcctgaattgagctttattggatatatggttaagaatgtacaaattaaaccatcgtttatagagaaacctaggagagtaataggtcaaataaaccaaccaacggcgactgtaactgaagttcatgcggcaacatctctctctgtttatactaaaccttattatggaaatacggataataaatttatttcgtatccagggtactcacaagatgaaaaagattatatagatgcatatgtgagtagattgttggatgatctagttattgttagcgatggcccaccgactggttatccggagtctgccgagatcgtagaggttccagaagatggtatcgtttctattcaagatgctgatgtgtatgtaaaaattgataatgttcctgataatatgagtgtttatcttcatactaatctgctaatgtttggaacacgaaaaaattcttttatatataacatttctaaaaagttttccgccattactggaacatatagtgatgccactaagagaacaatctttgctcacatatcacatagtatcaacatcatcgatacatctattcctgtaagtctttggactagtcaacgtaacgtctataacggagataatagatcagccgaatcaaaggccaaggatttgttcattaacgatcccttcatcaagggaatagattttaagaataagaccgatattatttctagactagaagttagatttggaaatgatgttctatattcagagaacggacccatctcgagaatttataatgaactactgacaaaaagcaataatggaacaagaaccctaacttttaactttacaccaaagatattctttaggccgacaactattacggctaatgtatctagggggaaagataaactatctgttcgagtagtttattccaccatggatgtcaaccatccaatctattatgtacaaaaacaattggtagttgtatgtaatgacctgtataaggtatcttacgatcaaggggtaagtattaccaagattatgggagataataactaa

SEQ ID NO: 287 - DNA, 453 bp, Vaccinia virus
  VACGL160
atggctaagcgagtaagccttccagatgtggttatttcagcacctaaagcagtctttaagcccgctaaagaagaagcactcgcttgtatactaccaaagtattataaatctatggcagatgtgtctattaagacaaatagtgtaattgataagtgttggttttgtaatcaagatttggtttttagacctattagtattgagacatacaagggtggtgaagtagggtatttctgttctaaaatatgtagggattcgttggcttctatggttaagtctcacgtagctcttagagaagaaccaaaaatttctttgttgcctttagtattctatgaagataaggaaaaggtcataaatacaataaacctactaagagataaagacggcgtttacggaagctgttactttaaggaaaactcacaaattatagatatttctctacggagtttattgtaa

SEQ ID NO: 288 - DNA, 675 bp, Vaccinia virus
  VACGL161
atgaatctacgattatgtagcggttgtagacataacggtatagtatctgaacaaggatatgaatattgtattttttgcgagtcggtatttcaaaaatgtacaaaggtacaaaaaaagtcaaacttccacgtgtctaataaacttattcatttgagaaatgtattgcggagattattgtctcatcaatgttctggagaaattatctcggaactcttggatatcatggaaaaaaatcaaatatccacggatgatgtagatgcaaattttgtatctagttttcttaaggctaacgagagaataaataaaaaggattataagttagtctttgaaataatcaatcaagtaaaagatgagaaactgaatctgagtacagaaaagattaatgaagtagtagaaatatttaagcacttggtattcttttgccaagaaaacactccttctaagacaattaattattcattctttttggataaaatattcgatatcacttctgtaactaaaaatctaaaacctcaaactgttaaaaattatacgaaaaataatagtaaccaattagtatgggaaaactttttagcacatatgagatctaaaaaacgtgtaactatggtagaggattatggacacgagtacgtttttgtagatgagaggttttctacttgctcattagaagtataa

SEQ ID NO: 289 - DNA, 231 bp, Vaccinia virus
  VACGL162
atgagttggtacgaaaaatataacattgtactgaatccgcctaagcggtgttcttctgcatgtgcggataatttaactactatattggcggaagacggtaacaatattagggcgatactttattcacagcccaaaaaactaaaaatattacaggattttctggcaacgtctagaaataaaatgtttttatataaaatattggacgacgagatacgtagagtgttaacatga

SEQ ID NO: 290 - DNA, 1935 bp, Vaccinia virus
  VACGL163
atggaagccgtggtcaatagcgatgtttttttaacatctaacgcaggactaaaatctagttatactaatcaaactctttctttggtagatgaagatcatattcacacttctgataaatctttgtcttgtagtgtatgcaattcattgtcccaaattgtagacgatgactttatatccgcaggggctagaaatcaacgtaccaaacctaaacgtgcaggaaatgatcaatctcaacagcctatcaaaaaggattgtatggtttccatcgacgaagtagcatccacgcatgattggagtacgagattgagaaatgatgggaatgcaattgctaaatatctaactactaacaagtatgacacatctaactttactattcaggatatgcttaacattatgaataaactaaatattgtcagaacaaatagaaacgagctatttcaactccttacccatgtaaagagcacattgaacaatgctagtgtttctgtgaaatgtactcatcctttagtacttattcattctcgagctagtcctagaatcggtgaccaactcaaagagttagataaaatatactctccatctaatcatcatattcttctgtcgactacacgattccaatccatgcattttaccgatatgtctagttcacaagatttgtcttttatttatagaaaaccagaaactaattactatattcatcctattctgatggcactattcggtattaaacttcctgcgctcgagaacgcgtatgtacatggagacacctatagcctaatccagcaactttatgaatttagaaaagtaaagtcttataattatatgttgttggttaatcgtcttacggaggataatccgatagtgattacaggtgtatcagatctaatttccacagagattcagagagcaaacatgcataccatgattagaaaagcaattatgaacattagaatgggaattttttattgtaacgatgatgatgcggtagatccccatctaatgaagattattcatactggatgctctcaagttatgacagatgaggaacagatattggcttctattttgtctatagttggatttagacctacgttggtttctgtggctagacctataaacggcatcagttacgatatgaaacttcaggcggcaccatacatagttgttaatcctatgaagatgatcacaacatccgacagtccgatttctatcaattccaaggatatttattctatggcattcgatggcaatagtggaagagtggtgttcgctcctcctaacataggctatggaagatgttctggagttacacacattgatccattgggaactaatgtgatgggtagtgctgttcattcccctgttatcgttaatggagcaatgatgttttatgtagaacgacgtcagaataagaatatgtttggtggagaatgttacaccggctttagatctctaatagatgatactccgattgacgtatcaccagaaattatgctaaacggtatcatgtataggttaaagtccgcagtttgttacaaactcggagaccaattctttgattgtggatcgtctgatatcttcttgaagggacattatacgattctatttacagaaaatggaccctggatgtacgatcctctttctgttttcaatccgggagctagaaatgctagattgatgcgagctctcaaaaaccagtacaagaaattatcaatggattcagacgatggtttttatgaatggttgaatggcgacggttcagtatttgctgcctcaaaacagcaaatgttgatgaatcacgttgctaactttgacgacgatcttctaactatggaagaagccatgtcgatgatttcgagacattgttgtatcttaatttatgcacaggattatgatcaatatattagcgctagacatattacagaactattttag

SEQ ID NO: 291 - DNA, 846 bp, Vaccinia virus
  VACGL165
atggacttctttaacaagttctcacagaggctggcagaatcctctacaccaaagtcgtcaatctattattctgaagaaaaggatccggatacgaaaaaggatgaagcgattgaaataggactaaagtctcaagagtcgtattatcaaagacagttgcgagaacaactagctagagataatatgatggccgccagcagacagcctatccaaccgctacaaccaactattcatataactccacagccggttccaacagctacatcggctcctattcttctacctagtagtactgctcctacaccaaaaccacgacaacaaactaatacatcatctgatatgtctaatctttttgattggctgtctgaagatactgatgcgccggcgagttcactccttccagcgttgacgccgagcaatgctgttcaggatattatctctaaatttaataaagatcaaaaaacgacgacgccgccatctacccaaccttctcagacgttaccaacaactacatgtacacaacaatcggatggaagtatttcttgtactactccaacggttacactttctcaacctcctattgtggccactgtatgtactcctacacctactggtggtacagtatgtacaacagcacaacaaaatccaaatccaggagcagcatctcaacaaaatctagacgatatggcccttaaggatctcatgtcgaatgttgaaagagatatgcaccaacttcaggccgaaacaaacgatctggtgacgaacgtatatgatgcaagggagtatacgcgtagggcaatagatcaaattctacaactagtcaaaggttttgaacgattccaaaagtaa

SEQ ID NO: 292 - DNA, 495 bp, Vaccinia virus
  VACGL167
atggcagacacagacgatattatcgactatgaatccgatgatctcaccgaatacgaggatgatgaagaagaggaagaagatggagagtcactagaaactagtgatatagatcccaaatcttcttataagattgtagaatcagcatccactcatatagaagatgcgcattccaatcttaaacatatagggaatcatatatctgctcttaaacgacgctatactagacgtataagtctatttgaaatagcgggtataatagcagaaagctataacttgcttcaacgaggaagattacctctagtttcagaattttctgacgaaacgatgaagcaaaatatgctacatgtaattatacaagagatagaggagggttcttgtcctatagtcatcgaaaagaacggagaattgttgtcggtaaacgattttgacaaagatggtctaaaattccatctagactatattatcaaaatttggaaacttcaaaaacgatattag

SEQ ID NO: 293 - DNA, 1119 bp, Vaccinia virus
  VACGL168
atggacaaacttagagttttatacgatgagttcgtcaccattagtaaagataatcttgaacgcgagactggtcttagcgcatcagatgttgatatggattttgatttaaacatttttatgacgttggttccagtcttggagaaaaaggtatgcgctattacaccaactatagaagatgataaaatcgtaactatgatgaaatattgtagttatcagagtttttcattctggttccttaaatctggtgccgttgtgaaatcggtatataataaactagatgatgtgaaaaaggaaaagtttgtagccacatttagagacatgttgcttaatgtacaaactctaatctctcttaactctatgtatactagactgcgtcaagataccgaagatatagtatccgattccaaaaaaataatggagattgtttcccatttgagagcgtcgactacagagaacgcggcgtatcaagttctccaacaaaacaatagttttatcatatctacactaaataaaatcttatctgatgaaaactatctcttgaaaattattgcagtattcgactctaaactaatttctgaaaaagagacattgaatgaatacaaacaattgtataccatttcttctgaaagtttggtatacggaatcagatgcgttagtaatctggatatatcatctgttcaactgagtaacaataaatacgttctctttgttaagaaaatgctacctaaaatcatactgtttcagaataacgacatcaacgcacaacaattcgctaatgttatttctaaaatttatacgttgatttatagacaattgacgtcgaatgtcgatgttggatgtctattgacagatacgatagaatctgccaaaactaaaatatctgtagaaaaaattaaacagacgggtatcaataatgttcaaagtcttatcaaattcatatctgataacaagaaagaatataagacaataatctctgaagaatatctatcgaaggaagatagaatcattactattttgcaagatatcgttaatgaacacgatataaagtacgacaataaattgctgaacatgcgagacttgattgtgacatttagagaacgatattcgtataaattctaa

SEQ ID NO: 294 - DNA, 2133 bp, Vaccinia virus
  VACGL169
atgcgatatatagtaagtccgcaattggtattacaggtgggtaaggggcaggaggtagaacgagccctatatctcactccatatgattacatagatgagaagtcgcccatatattattttttacgaagtcatttaaatatacaacagccggaaatagttaagagacatattctattgacgcttcgaatgactcaattaaagggatatttaggaaatttgttagatattaaggacgatattattatctattctcataagaataatttggaatatagttacgttgataatactatttttaatcccttcgtatacacgcagaaaaaaaccctactaaaaaacgatagctttttatacaatgtatatcctggagcgtgtgactttttggttatctgggtggccagagcgtgcgatacatctattccggaatttggatcgtacgaagatgtagataataatattatcaagtttgaaacaatgttgatggaagtatttccacaactagatttggacattactgtagaatcaaagtttaacaatatatttcgtaccaatctaaaactaactgggttaaaaaagatcattcagcgagttcaagacttggacattaattataagtcgttgttatctagatacgatgaacactttattaatatgaccggtaatcattttattctaaacgatgaacagttaaatctctccatttgggacttggatggtacattagcgttatctagcgacggcgataccgtgatgattaataacgtaaaactatttacagatcttgtgtccgatatagatacacaaatggaacgcatcaagggagatataacgtataaggtacatttggcgactcctatcaattctagaataaaattggatatcgagactagcttcatttttatagagacggcgactaataatattttactatcctcggataaaaaaatatctatcattttggccaaaaaccatatatctattaaagtgaaaaaccatattcctaacatagaaaaatattttacatttttagttattgccattaatgccatgtttaatagcgttcaaaagtctgctgattttaccaaagtggaaactgtttactggtctaggatatgccaaaatacaaagaataagaatagaaaacccatcattattaattatctagatcctggaatgaaaaaaatcagtaacaacttttacagatccgatgagaaagaagtctttattaatgataacggcataatgtttacgtgcatggatcctttggggaaatataataaggtgggatttcttaatatatttcatgatatgcggaaatattgtatcccttgttgttttctacatgatcaatctcatagaagcacattttcatcgtgtgttcatcaaattgacgttgagaaaaagatagtaagtccgtatatccttaattttggtaaagttgtaacagaatccaaaatgtcatttctccctattatttttgacgccttcttaaatgatggaatgactgctaatatggaacaagataataaacggctaaaggaaactagtggatatcatatagttagatgttgtgctggtgatgatatagttcgtttacgaactacatctgatattattcagtttgtaaacgaggataaaaatattcttatagttaacgacatggtatattttccaatgaacgcgtccgatataggaaagaaaatacatatactcattcaagaaatagttcatgaggtaatgatagtaaaaaagaaagagtctagtgataaaatcgattttttcccacccaactataagttattgaaggatctatttccaaaacaaactattcaaactcctattcaatctgacgcgggaatggtgttaacaaccgatggattctacatagatggaaaactttttaacgaagatctgtcgtctaaatacgttacatttacaaaaaatgttattgcgtctgatgccgtagctaaatatttttctcctttgtttaaatacgttatttcagaagctaaagatagatttatcaaaacgtggatgattaatattatgatacatatgaacgtagatcctaataatataataccgacgttagaaaaatactatcccaactctggaagagcacaaataaattaa

SEQ ID NO: 295 - DNA, 867 bp, Vaccinia virus
  VACGL172
atgttcgaaccagtaccagatcttaatttggaggcctccgtagaactaggggaggtaaatatagatcaaacaacacctatgataaaggagaatagcggttttatatcccgcagtagacgtctattcgcccatagatctaaggatgatgagagaaaactagcactacgattctttttacaaagactttattttttagatcatagagagattcattatttgttcagatgcgttgacgctgtaaaagacgtcactattaccaaaaaaaataacattatcgtggcgccttatatagcacttttaactatcgcatcaaaaggatgcaaacttacagaaacaatgattgaagcattctttccagaactatataatgaacatagtaagaaatttaaattcaactctcaagtatccatcatccaagaaaaactcggataccagtttggaaactatcacgtttatgattttgaaccgtattactctacagtagctctggctattcgagatgaacattcatctggcatttttaatatccgtcaagagagttatctggtaagttcattatctgaaataacatatagattttatctaattaatctaaaatctgatcttgttcaatggagtgctagtacgggcgctgtaattaatcaaatggtaaatactgtattgattacagtgtatgaaaagttacaactggtcatagaaaatgattcacaatttacatgttcattggctgtggaatcaaaacttccaataaaattacttaaagatagaaatgaattatttacaaaattcattaacgagttaaaaaagaccagttcattcaagataagcaaacgcgataaggatacgctactaaaatattttacttag

SEQ ID NO: 296 - DNA, 327 bp, Vaccinia virus
  VACGL173
atgtcatgttatacagctatattaaaatctgtaggaggactggcgctatttcaagtagccaatggcgccatagatttatgtagacatttctttatgtatttttgtgaacaaaagctacgaccaaattcattttggttcgttgttgttagagccattgcgagcatgataatgtatttagtattaggtatagcattgctgtatatttctgaacaagatgacaagaagaatactaataatgccaacactaataatgatagtaatagtaataatagtaacaatgataaacgaaatgagtcgtctataaattctaactccagtcctaagtaa

SEQ ID NO: 297 - DNA, 2676 bp, Vaccinia virus
  VACGL174
atgatgcctattaagtcaatagttactcttgatcaattagaggactctgaatatttatttcgtatagtttctaccgttcttccgcatctatgtctagattacaaagtatgtgaccaacttaaaacaaccttcgttcatccgttcgatatattgcttaataactcattaggatccgtaactaaacaagatgagcttcaggctgctatatccaaattgggcattaattatttaattgataccacgtcacgtgaattaaaactgtttaatgttacacttaacgctggaaatatagatattattaataccccaattaacattagttcggaaactaatcctatcattaatactcacagcttttacgatcttccacctttcactcaacaccttcttaatattagattgacggatacagaatacagagctagatttatcggtggttatattaaaccagatggctccgactcaatggatgttctagcagaaaagaaatatccagatcttaactttgataacacttatttgtttaacatcctctataaggatgttattaatgcaccaataaaagaattcaaggcaaaaattgttaacggtgtattaagcagacaagattttgataatcttataggtgttagacaatatataacaatacaagatcgaccccgctttgacgacgcttataacatcgcagatgctgctagacattatggagttaatcttaatacattgccattaccaaacgtcgatctcactactatgccaacatataaacatctcatcatgtttgaacagtacttcatttatacatatgacagagtggatatttattacaatggtaacaaaatgctcttcgatgatgagattataaactttactatttctatgcgatatcaatctcttattcctagactggtagatttctttccagatataccagtaaacaataacatcgtacttcatactcgcgatcctcaaaatgctgcagtgaatgtaaccgtggcgcttccaaacgtgcaatttgtggacataaatagaaacaacaaattctttattaatttctttaacctgttggcgaaggaacaaagatctacggctatcaaagttaccaaatccatgttttgggacggtatggattacgaggaatacaagtctaaaaaccttcaggacatgatgtttataaattctacctgttatgtattcggtctttataatcacaataatactacttattgctctatcctttctgatattatctccgcagagaaaacacctattagagtttgtttgttacctagagtagtcggaggtaagactgttactaatcttatttcagaaactttaaagagtatttcatctatgactatacgagagtttcccaggaaagataaatctatcatgcatataggactttctgagacgggattcatgagattcttccaactactcaggctcatggctgataaacctcatgaaacggctattaaagaggttgttatggcttatgtgggtataaagttgggtgacaaaggtagtccgtactatattagaaaggagtcataccaagactttatctatctgctattcgcatcaatgggctttaaggtgactactagaagatccattatgggaagcaataatatctctatcatcagtattagaccaaaagtaactaaacaatacatcgtcactacattgatgaaaactagttgtagtaaaaacgaggcagaaaaattaattacttcagcgtttgatcttctcaatttcatggtatcagttagtgactttagagattatcagagttacagacagtatagaaactattgtcctagatatttctatgcaggatctcccgaaggagaggaaaccattatctgtgactcggaaccgataagtatcttggatagaattgatactcgtggtatcttttctgcgtatactattaatgaaatgatggacactgatatcttttctccagagaataaggcatttaagaataatctgagtagatttatcgagagtggagatattacaggagaagatattttctgcgcaatgccatacaacatcttagataggattattacaaatgctggtacgtgtaccgtatccataggtgatatgttggataacattacaacccagtcagactgtaatatgactaacgaaatcacagatatgataaacgcctcattgaagaatacaatttctaaagataataatatgctagtcagccaagcattggactctgtagctaatcgttctaaacaaacgattggagacttgaggcaatcatcgtgtaagatggcattgttgtttaaaaatcttgctacatccatctacacaatagaacgtattttcaatgctaaagtaggcgatgatgttaaggcatcgatgttggagaagtataaagtattcacagatatttccatgtcattgtataaagacttgatagctatggagaatctcaaagcgatgctatacattattcgacgaagcggatgcagaatagacgatgcacaaattactactgacgatctagtcaagtcttactcattgatccgtcctaaaattctaagtatgataaactattataatgaaatgagtagaggatactttgaacacatgaaaaaaaatctaaatatgacagatggtgactctgtctcttttgatgatgaataa

SEQ ID NO: 298 - DNA, 957 bp, Vaccinia virus
  VACGL178
atgacgaccgtaccagtgacggatatacaaaacgatttaattacagagttttcagaagataattatccatctaacaaaaattatgaaataactcttcgtcaaatgtctattctaactcacgttaacaacgtggtagatagagaacataatgccgccgtagtgtcatctccagaggaaatatcctcacaacttaatgaagatctatttccagatgatgattcaccggccactattatcgaacgagtacaacctcatactactattattgacgatactccacctcctacgtttcgtagagagttattaatatcggaacaacgtcaacaacgagaaaaaagatttaatattacagtatcgaaaaatgctgaagcaataatggaatctagatctatgataacttctatgccaacacaaacaccatccttgggagtagtttatgataaagataaaagaattcagatgttagaggatgaagtggttaatcttagaaatcaacgatctaatacaaaatcatctgataatttagataattttaccaaaatactatttggtaagactccgtacaaatcaacagaagttaataagcgtatagccatcgttaattatgcaaatttgaacgggtcccccttatcagtcgaggacttggatgtttgttcggaggatgaaatagatagaatctataaaacgattaaacaatatcacgaaagtagaaaacgaaaaattatcgtcactaacgtgattattattgtcataaacattatcgagcaggcattgctaaaactcggatttgaagaaatcaaaggactgagtaccgatatcacttcagaaattatcgatgtggagatcggagatgactgcgatgctgtagcatctaaactaggaatcggtaacagtccggttcttaatattgtattgtttatactcaagatattcgttaaacgaattaaaattatttaa

SEQ ID NO: 299 - DNA, 579 bp, Vaccinia virus
  VACGL179
atggcggataaaaaaaatttagccgttagaagcagttacgatgattatatcgaaacagttaataagattacaccacagcttaaaaatctactagcgcaaatcggtggagatgcagccgtcaaaggaggcaacaataatcttaattctcaaacagatgtgactgccggcgcatgtgatacaaaatcaaagagttcaaaatgtattacatgtaaaccaaaatcaaaatcctcgtcttcttctacatcaacatccaagggctccaaaaatacttctggtgctcctagacgtagaacaacagttactactacatcgtacaatgcgatggatggtcagattgtccaagctgttactaatgctggtaaaatagtttatggtaccgtcagagacggccaattagaagttcgtggaatggtcggagagatcaatcacgatcttctaggtatcgactcagttaatgctgggaaaaagaaaccatctaaaaagatgcccactaataaaaagattaatatgtcgtccggtatgagacgacaggaacagattaatccagacgattgttgtctggatatgggaatgtattaa

SEQ ID NO: 300 - DNA, 213 bp, Vaccinia virus
  VACGL180
atgattggtattcttcttttgatcggtatttgtgtagcagttactgtcgccatcctatactcgatgtataataagatcaagaacttacaaaatccgaatccaagtccgaatttaaattcgcctcctccagaaccaaaaaataccaagtttgtaaataatctggaaaaggatcatattagttcattgtataatctagttaaatcttctgcataa

SEQ ID NO: 301 - DNA, 273 bp, Vaccinia virus
  VACGL181
atggacatgatgcttatgattggaaattatttttccggcgtgctaatcgctggaatcattcttttgattctttcgtgtatcttcgcctttattgactttagtaagtctaccagtcccactcgtacatggaaagtattgagtattatggcgtttatacttggtattattatcacagtcggaatgctaatttattctatgtggggaaagcactgcgcaccccacagagttagcggagtcattcacaccaatcatagcgatatttccatgaactaa

SEQ ID NO: 302 - DNA, 162 bp, Vaccinia virus
  VACGL182
atgataagtaattacgagccgttgctgctgttagttataacatgctgtgtactactatttaattttaccatatcttcgaaaacaaaaatagatattatttttgcagtacaaactattgtttttatatggtttatattccactttgttcattcggcgatttaa

SEQ ID NO: 303 - DNA, 285 bp, Vaccinia virus
  VACGL183
atgttcgtagacgataattcgttgataatttattctacatggcccagtacattgtccgattcatcaggtagggtcatcgttatgccagataatagatcattcacgtttaaggaagggtttaaattagatgaatcgataaaatctatattgttggtaaacccgtcgtctatagatctattaaagattagagtatataaacatcgcataaaatggatgggtgatatattcgtattatttgagcaagaaaatatcccaccaccttttcgtctagtaaatgataagtaa

SEQ ID NO: 304 - DNA, 1134 bp, Vaccinia virus
  VACGL184
atgggggcagctgttactcttaatagaatcaaaatagcaccaggaatagcagatatacgagacaaatatatggaattaggttttaattatcctgaatataatagagctgttaagtttgcagaagaaagttatacgtactattatgaaacatctccgggagaaattaaacccaagttttgtttgatagatggtatgtcgatagatcattgtagtagttttatagttcctgaatttgctaaacaatatgtattaattcatggagaaccatgtagttctttcaaatttcgtcctggatcattaatctattatcagaacgaggtaactcctgaatatattaaggatttaaaacacgctactgattatatagcatccgggcaacgatgtcattttataaaaaaggattatctcctgggcgatagtgatagcgtggcaaaatgttgttctaagacaaataccaaacactgtccaaaaatatttaataataattacaagacagaacattgtgacgatttcatgactggattttgtagaaacgatcctggaaaccccaattgtttagaatggttacgtgcaaaacggaaaccggctatgtctacttattccgatatttgctccaaacatatggatgcgagatattgttctgagtttattagaattattcgtcctgattattttacttttggggatacggcattatacgtcttttgtaacgatcataaaggaaatagaaattgttggtgcgcgaattatccaaaatctaattccggagataaatatttaggacctagggtatgttggttacatgagtgcactgacgaatctagagatagaaaatggttatattataatcaagatgttcaacgaactagatgtaaatacgttgggtgcacgattaacgttaactctttagcgttaaaaaattcccaagcggaacttacgtctaattgtactagaactacgtccgccgttggtgacgtacatccaggagaacctgtagtaaaagataaaataaaactgcctacctggttgggcgcggccataacactggttgtaatatctgttattttctattttatatccatttattcgcgtcctaaaattaaaacaaatgatataaatgttcgtagacgataa

SEQ ID NO: 305 - DNA, 612 bp, Vaccinia virus
  VACGL185
atgagttatttaagatattacaatatgcttgacgacttctctgcgggtgctggagtgcttgataaagatttatttacagaggaacagcagcaatcgtttatgcctaaagatggaggtatgatgcaaaacgattatggaggaatgaatgattatttgggaatcttcaaaaataatgatgttagaacgttactcggtttgattttgttcgtcttggctctatatagccctcctctaatctctatattgatgatatttatctcatcttttctattgcctcttactagcttagttattacctattgcttagtaactcaaatgtatcgtggaggtaatggcaacactgtgggaatgtctattgtgtgtattgtagctgctgtaattattatggcaatcaatgtatttacgaattcacagatatttaatattatttcttacattattttgtttattctgttctttgcatatgtgatgaacatcgaaagacaggactatagaagaagtataaatgtaaccattcctgaacagtatacctgcaacaaaccttatactgcgggaaataaggtagatgttgatataccaacatttaacagtttaaatactgacgattattaa

SEQ ID NO: 306 - DNA, 1482 bp, Vaccinia virus
  VACGL186
atgtcactattaaagatggagtataatctttatgccgaactaaaaaaaatgacttgtggtcaacccctaagtctttttaacgaagacggggatttcgtagaagttgaaccgggatcatcctttaagtttctgatacctaagggattttacgcctctccttccgtaaagacgagtctagtattcgagacattaacaacgaccgataataaaatcactagtatcaatccaacaaatgcgccaaagttatatcctcttcaacgcaaagtcgtatctgaagtagtttctaatatgaggaaaatgatcgaatcaaaacgtcctctatacatcactcttcacttggcgtgtggatttggtaagactattaccacgtgttatcttatggctacacacggtagaaaaaccgtcatttgcgtacccaataaaatgttaatacatcaatggaagacacaggtagaggcagtcggattggaacataagatatccatagatggagtaagtagtctattaaaggaactaaagactcaaagtccggatgtattaatagtagtcagtagacatctgacaaacgatgccttttgtaaatatatcaataagcattatgatttgttcatcttggatgaatcacatacgtataatctgatgaacaatacagcagttacaagatttttagcgtattatcctccgatgatgtgttattttttaactgctacacctagaccatctaaccgaatttattgtaacagtattattaatattgccaagttatccaatctaaaaaaaactatctatgcagtagatagtttttttgagccatattccacagataatattagacatatggtaaaacgactagatggaccatctaataaatatcatatatataccgagaagttattatctgtagacgagcctagaaatcaacttattcttgataccctggtagaagaattcaagtcaggaactattaatcgcattttagttattactaaactacgtgaacatatggtattattctacaaacgattattagattttttcggaccagaggttgtatttataggagacgcccaaaatagacgtactccagatatggtcaaatcaatcaaggaactaaatagatttatattcgtatccaccttattttattccggtactggtttagatattcctagtttggattcgttgttcatttgctcggcagtaatcaacaatatgcaaatagagcaattactagggagggtatgtcgagaaacagaactattagataggacggtatatgtatttcctaacacatccatcaaagaaataaagtacatgataggaaatttcatgcaacgaattattagtctgtctgtagataaactaggatttaaacaaaaaagttatcggaaacatcaagaatccgatcccacttctgcatgtacaacatcatccagagaagaacgtgtattaaatagaatatttaactcgcaaaatcgttaa

SEQ ID NO: 307 - DNA, 234 bp, Vaccinia virus
  VACGL187
atggatagcaccaatgtgcgttccggaatgaagagtcgcaaaaagaagcccaagactacagttatcgatgacgatgatgattgcatgacgtgttctgcctgtcagtctaaattggttaagatttccgacatcacaaaagtatcattggattatattaatactatgaggggtaatacactggcctgcgcagcatgcggatcgtcgcttaaacttcttaacgattttgcgagttaa

SEQ ID NO: 308 - DNA, 354 bp, Vaccinia virus
  VACGL188
atgataactttatttttaatcctatgttatttcattcttatttttaatattatagtacctgcaatatctgaaaaaatgagacgcgaacgagccgcatacgtaaactacaaacgtctaaacaagaatttcatttgtgtcgatgatagactgtttagttataattttacaacatctggaattaaggcaaagatggccgttgataacaaaaatgttcccattccatgttccaagataaacgaggtcaataataataaaaatgtcgatacactatattgtgataaagatagagacgatataccaggttttgcacgatcgtgttatagggcatattctgacttattttttactacctaa

SEQ ID NO: 309 - DNA, 1281 bp, Vaccinia virus
  VACGL189
atgacttctagcgctgatttaactaacttaaaagaattacttagtctgtacaaaagtttgagattttcagattctgcggctatagaaaagtataattctttggtagaatggggaacatctacttactggaaaataggcgtgcaaaaggtagctaatgtcgagacgtcaatatctgattattatgatgaggtaaaaaataaaccgtttaatattgatccgggctattacattttcttaccggtatattttgggagcgtctttatttattcgaagggtaaaaatatggtagaacttggatctggaaactcttttcaaataccagatgatatgcgaagtgcgtgtaacaaagtattagacagcgataacggaatagactttctgagatttgttttgttaaacaatagatggataatggaagatgctatatcaaaatatcagtctccagttaatatatttaaactagctagtgagtacggattaaacatacccaaatatttagaaattgaaatagaggaagacacattatttgacgacgagttatactctattatagaacgctctttcgatgataaatttccaaaaatatccatatcgtatattaagttgggagaacttagacggcaagttgtagactttttcaaattctcattcatgtatattgagtccatcaaggtagatcgtataggagataatatttttattcctagcgttataacaaaatcaggaaaaaagatattagtaaaagatgtagaccatttaatacgatccaaggttagagaacatacatttgtaaaagtaaaaaagaaaaacacattttccattttatacgactatgatggaaacggaacagaaactagaggagaagtaataaaacgaattatagacactataggacgagactattatgttaacggaaagtatttctctaaggttggtagtgcaggcttaaagcaattgactaataaattagatattaatgagtgcgcaactgtcgatgagttagttgatgagattaataaatccggaactgtaaaacgaaaaataaaaaaccaatcagcatttgatttaagcagagaatgtttgggatatccagaagcggattttataacgttagttaataacatgcggttcaaaatagaaaattgtaaggttgtaaatttcaatattgaaaatactaattgtttaaataacccgagtattgaaactatatatggaaactttaaccagttcgtctcaatctttaatgtcgtcaccgatgtcaaaaaaagattattcgagtga

SEQ ID NO: 310 - DNA, 564 bp, Vaccinia virus
  VACGL192
atggaaactttaaccagttcgtctcaatctttaatgtcgtcaccgatgtcaaaaaaagattattcgagtgaaataatatgcgcctttgatataggtgcaaaaaatcctgccagaactgttttagaagtcaaggataactccgttagggtattggatatatcaaaattagactggagttctgattgggaaaggcgcatagctaaagatttgtcacaatatgaatacactacagttcttctagaacgtcagcctagaaggtcgccgtatgttaaatttatctattttattaaaggctttttatatcatacatcggctgccaaagttatttgcgtctcgcctgtcatgtctggtaattcatatagagatcgaaaaaagagatcggtcgaagcatttcttgattggatggacacattcggattgcgagactccgttccggatagacgcaaattagacgatgtagcggatagtttcaatttggctatgagatacgtattagataaatggaatactaattatacaccttataataggtgtaaatctagaaattacataaaaaaaatgtaa

SEQ ID NO: 311 - DNA, 1149 bp, Vaccinia virus
  VACGL193
atggataatctatttacctttctacatgaaatagaagatagatatgccagaactatttttaactttcatctaataagttgcgatgaaataggagatatatatggtcttatgaaagaacgcatttcctcagaggatatgtttgataatatagtgtataataaagatatacatcctgccattaagaaactagtgtattgcgacatccaacttactaaacacattattaatcagaatacgtatccggtatttaacgattcttcacaagtgaaatgttgtcattatttcgacataaactcagataatagcaatattagctctcgtacagtagagatatttgagagggaaaagtcatctcttgtatcatatattaaaactaccaataagaagagaaaggtcaattacggcgaaataaagaaaactgttcatggaggcactaatgcaaattacttttccggtaaaaagtctgacgagtatctgagtactacagttagatccaacattaatcaaccttggatcaaaaccatctctaagaggatgagagttgatatcattaatcactctatagtaacgcgtggaaaaagctctatattacaaactatagaaattatttttactaatagaacatgtgtgaaaatattcaaggattctactatgcacattattctatccaaggacaaggatgaaaaggggtgtatacacatgattgacaaattattctatgtctattataatttatttctgttgttcgaagatatcatccaaaacgagtactttaaagaagtagctaatgttgtaaaccacgtactcacggctacggcattagatgagaaattattcctaattaagaaaatggctgaacacgatgtttatggagttagcaatttcaaaatagggatgtttaacctgacatttattaagtcgttggatcataccgttttcccctctctgttagatgaggatagcaaaataaagttttttaaggggaaaaagctcaatattgtagcattacgatctctggaggattgtataaattacgtgactaaatccgagaatatgatagaaatgatgaaggaaagatcgactattttaaatagcatagatatagaaacggaatcggtagatcgtctaaaagaattgcttctaaaatga

SEQ ID NO: 312 - DNA, 3495 bp, Vaccinia virus
  VACGL194
atgaaaaaaaacactaattcagaaatggatcaacgactagggtataagtttttggtgcctgatcctaaagccggagttttttatagaccgttacatttccaatatgtatcgtattctaattttatattgcatcgattgcatgaaatcttgaccgtcaagcggccactcttatcgtttaagaataatacagaacgaattatgatagaaattagcaatgttaaagtgactcctccagattactcacctataatcgcgagtattaaaggtaagagttatgacgcattagccacgttcactgtaaatatctttaaagaggtaatgaccaaagagggtatatccatcactaaaataagtagttatgagggaaaagattctcatttgataaaaattccgctactaataggatacgggaataaaaatccacttgatacagccaagtatcttgttcctaatgtcataggtggagtctttatcaataaacaatctgtcgaaaaagtaggaattaatctagtagaaaagattacaacatggccaaaatttagggttgttaagccaaactcattcactttctcgttttcctccgtatcccctcctaatgtattaccgacaagatatcgccattacaagatatctctggatatatcacaattggaagcgttgaatatatcatcgacaaagacatttataacggtcaatattgttttgctgtctcaatatttatctagagtgagtctagaattcattagacgtagtttatcatacgatatgcctccagaagttgtctatctagtaaacgcgataatagatagtgctaaacgaattactgaatctattactgactttaatattgatacatacattaatgacctggtggaagctgaacacattaaacaaaaatctcagttaacgatcaacgagttcaaatatgaaatgctgcataactttttacctcatatgaactatacacccgatcaactaaagggattttatatgatatctttactaagaaagtttctctactgtatcttccacacttctagatatccagatagagattcgatggtttgtcatcgcatcctaacgtacggcaaatattttgagacgttggcacatgatgaattagagaattacataggcaacatccgaaacgatatcatgaacaatcacaagaacagaggcacttacgcggtaaacattcatgtactaacaactcccggacttaatcacgcgttttctagcttattgagtggaaagttcaaaaagtcagacggtagttatcgaacacatcctcactattcatggatgcagaatatttctattcctaggagtgttggattttatccggatcaagtaaagatttcaaagatgttttctgtcagaaaataccatccaagtcaatatctttacttttgttcatcagacgttccggaaagaggtcctcaggtaggtttagtatctcaattgtctgtcttgagttccattacaaatatactaacgtctgagtatttggatttggaaaagaaaatttgtgagtatatcagatcatattataaagatgatataagttactttgaaacaggatttccaatcactatagaaaatgctctagtcgcatctcttaatccaaatatgatatgtgattttgtaactgactttagacgtagaaaacggatgggattcttcggtaacttggaggtaggtattactttagttagggatcacatgaatgaaattcgcattaatattggagcgggaagattagtcagaccattcttggttgtggataacggagagctcatgatggatgtgtgtccggagttagaaagcagattagacgacatgacattctctgacattcagaaagagtttccgcatgtcatcgaaatggtagatatagaacaatttacttttagtaacgtatgtgaatcggttcaaaaatttagaatgatgtcaaaggatgaaagaaagcaatacgatttatgtgactttcctgccgaatttagagatggatatgtagcatcttcattagtgggaatcaatcacaattctggacccagagctattcttggatgtgctcaagctaaacaagctatctcttgtctgagctcggatatacgaaataaaatagacaatggaattcatttgatgtatccagagaggccaatcgtgattagtaaggctttagaaacttcaaagattgcggctaattgcttcggccaacatgttactatagcattaatgtcgtacaaaggtatcaatcaagaggatggaattatcatcaaaaaacaatttattcagagaggcggtctcgatattgttacagccaagaaacatcaagtagaaattccattggaaaactttaataacaaagaaagagataggtctaacgcctattcaaaattagaaagtaatggattagttagactgaatgctttcttggaatccggagacgctatggcacgaaatatctcatcaagaactcttgaagatgattttgctagagataatcagattagcttcgatgtttccgagaaatataccgatatgtacaaatctcgcgttgaacgagtacaagtagaacttactgacaaagttaaggtacgagtattaaccatgaaagaaagaagacccattctaggagacaaatttaccactagaacgagtcaaaagggaacagtcgcgtatgtcgcggatgaaacggaacttccatacgacgaaaatggtatcacaccagatgtcattattaattctacatccatcttctctagaaaaactatatctatgttgatagaagttattttaacagccgcatattctgctaagccgtacaacaataagggagaaaaccgacctgtctgttttcctagtagtaacgaaacatccatcgatacatatatgcaattcgctaaacaatgttatgagcattcaaatccgaaattgtccgatgaagaattatcggataaaatcttttgtgaaaagattctctatgatcctgaaacggataagccttatgcatccaaagtattttttggaccaatttattacttgcgtctgaggcatttaactcaggacaaggcaaccgttagatgtagaggtaaaaagacgaagctcattagacaggcgaatgagggacgaaaacgtggaggaggtatcaagttcggagaaatggagagagactgtttaatagcgcatggtgcagccaatactattacagaagttttgaaagattcggaagaagattatcaagatgtgtatgtttgtgaaaattgtggagacatagcagcacaaatcaagggtattaatacatgtcttagatgttcaaaacttaatctctctcctctcttaacaaaaattgataccacgcacgtatctaaagtatttcttactcaaatgaacgccagaggcgtaaaagtcaaattagatttcgaacgaaggcctccttcgttttataaaccattagataaagttgatctcaagccgtcttttctggtgtaa

SEQ ID NO: 313 - DNA, 630 bp, Vaccinia virus
  VACGL196
atggaaacaatcaaagcgttggagaaatttatggagttcgatcgccttcagaaagactgctctgataaactcgatagagagagggagagacgcatgaaggctgaacgtgaaatcgctcgtaaaaactgcggaggtaacccatgcgaacgtgaattggaatctgaacgtagtaacgtgaagaggttggaatatcaactagatgcggagaaagaaaaagttaagttctacaaaagagaactagaacgtgatcggtatctttctagtagatatcttacctcttcttcagatccacataagaaaccattaccaaattatacattttctcgcattaaaaatgtatctccgttgacaactgaggctacaggttctgtagaagtagcacctccatccacagacgttaccgaaccgattagtgatgtgacaccatcggtggatgccgaaccagaacatccacagctttctgaatatcagacttcagtatcccaagtagcagttacacctccaccaaaacctgaaactccacagattttcgaatatcagacgtccgattctatagttaacaatccacgcccattttataattcggatctcgaatttgatgatattgatatgtatctactaccaaactag

SEQ ID NO: 314 - DNA, 684 bp, Vaccinia virus
  VACGL197
atgaaaccaatgccgaaacagagagagatgcgacgtcttagagatagaatctcagatattgaaagacagttgagtgactgcagacgtaataatgaaagcaatgctgatatggaaagagagatgcaacgtcttagagatagaatcatggatcttgatagacagcttaacgagtgtaaacgcaacggtaacggaacatcttctgaggaggtaaataggctaaagactagaattaggaatcttaaacgatcgctagagatctgctcaaaggatgaatcagaactctattcagcatataaaactaaactcggacgtgctagggaacaaattagtaacttgcaagaaagtctacgtagagagcgtgaatctgacaaaacagatagttactacaggagggaattgactcgcgaaagaaataaaatcgtagaattggaaaaagaacttaataagtgtttcgatgccaagtacatcgacgaaatcaattccaagaaaacccgtatttctgatctcgaacgacaactagcagcctgtaaatctaatggtggtagcaatggaaacatggaccaatacaaacgggaaattgaatctcttaaacgcgagctcgccgagtgtagacgtggtaacaatggatctcacagtgattgcgcgtactatgacgaagaagcaagagaggaagttaagagctga

SEQ ID NO: 315 - DNA, 2166 bp, Vaccinia virus
  VACGL199
atggaggtcacgaaccttattgaaaaatgtaccaagcactccaaagatttcgccactgaggtagaaaaactatggaacgatgagttgagttctgaatcaggtctctcaagaaaaacaagaaatgtaattcgtaatattcttcgtgatatcactaagtcattaactacagataagaaatcaaagtgtttccgtatactagaacgttcgacgattaacggagagcagattaaagatgtatataaaactatttttaataatggtgttgatgtggagtctagaatcaacactacaggaaagtatgttctatttacagttatgacttatgttgctgctgaactacgactcattaagtcagacgagatattcgctcttctatcaagattttttaacatgatatgtgatattcatagaaaatacggatgtggtaatatgtttgttggtattcccgctgctctaattaatctattggaaattgatcacattaacaaactgtttagcgtgtttagtacaagatatgacgccaagacatacctatacactgaatatttcctctttcttaacattaatcattatctacttagtggttcagatttatttatcaacgtagcatatggtgctgtatctttttcgtcacccattagtgttccagattatatcatggaagcactgacatttaaggcatgtgatcatattatgaaatctggagatctaaaatatacatatgcgtttactaaaaaggttaaggatctgtttaatactaaatctgattctatttatcaatacgttagacttcatgaaatgtcatatgatggtgtttcagaagatacggatgatgacgatgaggtattcgctatccttaacttgagtattgattccagcgttgatagatacagaaacagagttcttctactaactcccgaagtcgcgtctcttagaaaagaatattctgaagtagaacccgattataaatacttgatggatgaggaagtgcccgcgtacgacaagcatttgcctaagcctattactaacactggtattgaagaaccacacgctactggaggagatgaggaccaaccaattaaggttgtccatccccctaataatgataaagatgatgctatcaagccatacaatccattagaagatcctaattatgttcccacaattacaagaacggctataggaatcgctgattaccaactagttattaataaactaattgaatggttagataaatgcgaggaagaatgcggaaatagtggagagtttaaaacagagttggaagaagccaagagaaaactcaccgaattgaatgcagaacttagtgataaactcagtaagattaggactttggaaagggattctgtttataaaaccgaaagaatcgaccgacttacaaaagagatcaaagaacacagggatattcaaaatgggacagatgatggttcagatttattagaaattgataagaagactatccgagaattgagagaatcgcttgatagggaacgagaaatgcgttcagaactagaaaaggaactggatactattaggaatggaaaagtagatggatcttgtcaacgagaacttgaactcagtcgtatgtggctaaaacaacgcgatgacgatctccgagctgaaatcgataaacgtcgtaatgtcgaatgggaactgtccagacttcgtagggatatcaaggaatgcgacaaatacaaggaggatcttgataaggccaagacaactattagtaactacgtaagcaaaatcagtactctagaatcagaaattgctaaatatcaacaagatagggacacgctttctgtagtacgcagagaacttgaggaagaacgacgacgcgttagagatctcgatgaatgtacacgcaaccaggaagacacgcaagaagttgatgcactgcgttcgcgtattagagaactagagaataagttgaccgactgcatcgagagcggaggaggaaatcttacagagattagcagactccaatctaaaatttcagatcttgaaagacaactgagtgaatgccgtgaaaatgctacagagattagcagactccaatctagaatatcagatcttgaaagacagttgaacgactgtaaacgtaataatgaaaccaatgccgaaacagagagagatgcgacgtcttag

SEQ ID NO: 316 - DNA, 1503 bp, Vaccinia virus
  VACGL201
atggcgaacattataaatttatggaacggaattgtaccaacggttcaagatgttaatgttgcgagcattactgcgtttaaatctatgatagatgaaacatgggataaaaaaatcgaagcaaatacatgcatcagtagaaaacatagaaacattattcacgaagttattagggactttatgaaagcctatcctaaaatggatgagaatagaaaatctccattaggagctccaatgcaatggctaacacaatattatattttaaagaatgaatattacaagaccatgatagcgtatgataatggatcattgaatacaaaatttaaaacgttaaacatttatatgattactaacgtgggtcaatatattttatatatagtattttgtataatatctggtaagaatcacgatggtactccttatatatacgattctgaaataacgagcaatgataaaaatcttattaataagcgtatcaagtatgcatgtaagcaaatattacacggtcaattaactatagctctgagaattagaaataaattcatgtttataggatcacccatgtatttatggtttaacgtaaacggatcacaggtatatcacgacatatatgatcgtaatgccggttttcataataaagagataggtagactactatacgcatttatgtactatctatctataagtggtagatttttgaatgatttcgcactattaaagtttacgtatttaggagaatcctggacatttagtttgagtgttcctgaatatatattatatggtttaggatattctgtttttgatactattgaaaaatttagcaatgatgctatactcgtttatattagaacaaacaatagaaatggatatgattatgtagagtttaataaaaaaggaattgctaaggtgacagaagataaacccgataacgataagcgaattcatgctataagactcatcaacgatagtactgatgttcaacacatacattttgggtttagaaatatggtaataatagacaatgaatgcgctaatattcagtcgagtgctgaaaatgcaactgatacaggacatcatcaagatagcaaaataaatatcgaagtcgaagatgatgtcatagacgatgatgattataatccaaaacccactccgataccggagcctcaccctagaccaccgtttcccagacatgaatatcataagaggccgaaacttcttcctgtagaagaacctgatcctgtcaaaaaagacgcggatcgtataagacttgataatcatatattaaacacattggatcataatcttaatttcatcggacactattgttgtgatacagcggcagttgataggttagaacatcacatcgaaacattgggacaatatgcagtaatactagcaagaaagataaatatgcaaacattactgttcccatggccattacctactgtccatccacatgcgatagatggtagtattccgccacatgggagatctacgatcttataa

SEQ ID NO: 317 - DNA, 333 bp, Vaccinia virus
  VACGL203
atggacggaactcttttccccggagatgacgatcttgcaattccagcaactgaatttttttctacaaaggctgctaaaaagccagaggctaaacgcgaagcaattgttaaagccgatgaagacgacaatgaggaaactctcaaacaacggctaactaatttggaaaaaaagattactaatgtaacaacaaagtttgaacaaatagaaaagtgttgtaaacgcaacgatgaagttctatttaggttggaaaatcacgctgaaactctaagagcggctatgatatctctggctaaaaagattgatgttcagactggacggcgtccatatgagtaa

SEQ ID NO: 318 - DNA, 441 bp, Vaccinia virus
  VACGL204
atgaactctctatcaattttttttattgtggtagcgacggctgcggtgtgtttactttttatccagggttactcaatatatgaaaattatggcaatattaaggaatttaatgctactcatgcagcattcgaatattcaaaatctataggtggaacaccggcattagataggagagttcaagatgtcaacgacacaatttctgatgtaaagcaaaagtggagatgtgtggtttatccaggaaacggttttgtatccgcttccatatttggatttcaggcagaagttggacccaataatactagatccattagaaaatttaacacgatgcaacaatgtatagactttacattttctgatgttattaacatcaatatttataatccatgtgttgtaccaaatataaataacgcagagtgtcagtttctaaaatctgtactttaa

SEQ ID NO: 319 - DNA, 918 bp, Vaccinia virus
  VACGL205
atgcagcatccgcgggaagagaattcaatcgtcgttgaactcgaaccctcattggctacatttatcaaacaaggatttaataatctcgtaaaatggcccttgttaaacattggaatagttttgtctaatacatctaccgctgtcaatgaggaatggctaactgcggtagagcatattcccaccatgaagatattttacaaacatatacataagatacttactagagaaatggggtttttagtctatttgaaaagatcacaatctgaacgcgataattatataactttatacgattttgattattatattatagataaggatacaaattctgtaactatggtagataaaccgaccgagttaaaggaaactttgttacatgtatttcaagaatatcgtttaaagagttctcaaacaatagagcttatagcgtttagttcaggtacggtaataaacgaagacatagtttcaaaattaacatttttagatgtggaggtatttaatagagaatataataatgttaaaactatcatagatccggattttgtatttagatctccatttatagttatttctcctatgggtaaactaactttcttcgtagaagtatattcgtggtttgattttaaatcgtgtttcaaagatattatagatttcttagaaggtgctctaatagccaatattcataatcacatgattaaggtaggtaattgtgacgaaacagtatcgtcttataatccagagtctggaatgttgtttgttaatgacttaatgactatgaacatagtcaactttttcggatgtaattctaggttagaatcataccatcggttcgatatgacaaaagtagatgttgaactatttattaaagcattgtctgatgcgtgtaaaaaaattttgtcagcttctaatagattataa

SEQ ID NO: 320 - DNA, 213 bp, Vaccinia virus
  VACGL206
atggtgggaatatgctctaccgcagttagccattcctcattgacagcggtagatgtattagacaaaactattccaatgtttaacaagggccattttacgagattattaaatccttgtttgataaatgtagccaatgagggttcgagttcaacgacgattgaattctcttcccgcggatgctgcatgatgaacgacgggatgttgttcgattga

SEQ ID NO: 321 - DNA, 234 bp, Vaccinia virus
  VACGL207
atggaagaccttaacgaggcaaacttctcacatttattgataaatttatctaataataaagatatcgatgcgcaatacgcgtctacattatccgtggtacatgaattgctatccgctataaattttaaaatatttaatataaacaaaaagtcgaaaaagaattccaaatcaatcgaacaacatcccgtcgttcatcatgcagcatccgcgggaagagaattcaatcgtcgttga

SEQ ID NO: 322 - DNA, 375 bp, Vaccinia virus
  VACGL208
atggcatctattttaaatacacttaggtttttggaaaaaacatcattttataattgtaacgattcaataactaaagaaaagattaagattaaacataagggaatgtcatttgtattttataagccaaagcattctaccgttgttaaatacttgtctggaggaggtatatatcatgatgatttggttgtattggggaaggtaacaattaataatctaaagatgatgctattttacatggatttatcatatcatggagtgacaagtagtggagcaatttacaaattgggatcgtctatcgatagactttctctaaataggactattgttacaaaagttaataattatgatgatacattttttgacgacgatgattga

SEQ ID NO: 323 - DNA, 813 bp, Vaccinia virus
  VACGL209
atgaattgtttccaagaaaaacaattttcaagagaaaatttattaaaaatgccgtttagaatggttttaacaggaggatctggatctggaaaaactatctatttactatctctgttttctacactagttaaaaaatataaacatatattcttgtttacacccgtttataacccagattatgatggatacatttggccaaatcatattaatttcgttagtagtcaggaatctctagaatataatctgatacgaactaaaagtaacatagaaaaatgtattgctgtcgcacaaaatcataaaaaatcagcacactttttacttatttttgatgatgtaggcgataaactatcaaaatgcaatactctaatagaattcttaaactttggaaggcatttaaacacgtctattattctactatgccaaacttatagacacgtaccaatattaggacgggctaacattacgcatttttgtagttttaacatttccatatcagacgcggaaaatatgctacgatcgatgcctgtaaaggggaaacgaaaggatatattaaacatgttgaatatgatacagacagctagatccaataatcgattggctattattatcgaagactccgtattttgtgaaggtgaattacgtatatgtaccgataccgccgataaggacgtcatagaacaaaagttaaacatagatattttagtaaatcaatattctcatatgaaaaagaacctaaacactatattagaaagtacaaaaacaaaattgtgcaatagcgatcaatcatcgtcgtcaaaaaatgtatcatcataa

SEQ ID NO: 324 - DNA, 558 bp, Vaccinia virus
  VACGL211
atgatgacaccagaaaacgacgaagagcagacatctgtgttctccgctactgtttacggagacaaaattcagggaaagaataaacgcaaacgcgtgattggtctatgtattagaatatctatggttatttcactactatctatgattaccatgtccgcgtttctcatagtgcgcctaaatcaatgcatgtctgctaacgaggctgctattactgacgccgctgttgccgttgctgctgcatcatctactcatagaaaggttgcgtctagcactacacaatatgatcacaaagaaagctgtaatggtttatattaccagggttcttgttatatattacattcagactaccagttattctcggatgctaaagcaaattgcactgcggaatcatcaacactacccaataaatccgatgtcttgactacctggctcattgattatgttgaggatacatggggatctgatggtaatccaattacaaaaactacatccgattatcaagattctgatgtatcacaagaagttagaaagtatttttgtgttaaaacaatgaactaa

SEQ ID NO: 325 - DNA, 507 bp, Vaccinia virus
  VACGL212
atgaaatcgcttaatagacaaactgtaagtaggtttaagaagttgtcggtgccggccgctataatgatgatactctcaaccattattagtggcataggaacatttctgcattacaaagaagaactgatgcctagtgcttgcgccaatggatggatacaatacgataaacattgttatttagatactaacattaaaatgtctacagataatgcggtttatcagtgtcgtaaattacgagctagattgcctagacctgatactagacatctgagagtattgtttagtattttttataaagattattgggtaagtttaaaaaagaccaatgataaatggttagatattaataatgataaagatatagatattagtaaattaacaaattttaaacaactaaacagtacgacggatgctgaagcgtgttatatatacaagtctggaaaactggttaaaacagtatgtaaaagtactcaatctgtactatgtgttaaaaaattctacaagtga

SEQ ID NO: 326 - DNA, 231 bp, Vaccinia virus
  VACGL213
atgtcggaatattttatatcccgtacatctatttggacagtttttatgttacctataatgtatggtcctataaagtccatgattgagatatcgagatcatcatacaatgtatctgttatagtcaacacacccattggagtaataacaaacgcggcgtccatggcggcgtacgttaacgacttattattaattcattttttgttgtcacttgtagaattttttaacacatag

SEQ ID NO: 327 - DNA, 531 bp, Vaccinia virus
  VACGL214
atggacgccgcgtttgttattactccaatgggtgtgttgactataacagatacattgtatgatgatctcgatatctcaatcatggactttataggaccatacattataggtaacataaaaactgtccaaatagatgtacgggatataaaatattccgacatgcaaaaatgctactttagctataagggtaaaatagttcctcaggattctaatgatttggctagattcaacatttatagcatttgtgccgcatacagatcaaaaaataccatcatcatagcatgcgactatgatatcatgttagatatagaagataaacatcagccattttatctattcccatctattgatgtttttaacgctacaatcatagaagcgtataacctgtatacagctggagattatcatctaatcatcaatccttcagataatctgaaaatgaaattgtcgtttaattcttcattctgcatatcagacggcaatggatggatcataattgatgggaaatgcaatagtaattttttatcataa

SEQ ID NO: 328 - DNA, 666 bp, Vaccinia virus
  VACGL215
atgatgctggtacctcttatcacggtgaccgtagttgcgggaacaatattagtatgttatatattatatatttgtaggaaaaagatacgtactgtctataatgacaataaaattatcatgacaaaattaaaaaagataaagagttctaattccagcaaatctagtaaatcaactgatagcgaatcagactgggaggatcactgtagtgctatggaacaaaacaatgacgtagataatatttctaggaatgagatattggacgatgatagcttcgctggtagtttaatatgggataacgaatccaatgttatggcgcctagcacagaacacatttacgatagtgttgctggaagcacgctgctaataaataatgatcgtaatgaacagactatttatcagaacactacagtagtaattaatgaaacggagactgttgaagtacttaatgaagataccaaacagaatcctaactattcatccaatcctttcgtaaattataataaaaccagtatttgtagcaagtcaaatccgtttattacagaacttaacaataaatttagtgagaataatccgtttagacgagcacatagcgatgattatcttaataagcaagaacaagatcatgaacacgatgatatagaatcatcggtcgtatcattggtgtga

SEQ ID NO: 329 - DNA, 792 bp, Vaccinia virus
  VACGL216
atggagatattccctgtattcggcatttctaaaattagcaattttattgctaataatgactgtagatattatatagatacagaacatcaaaaaattatatctgatgagatcaatagacagatggatgaaacggtacttcttaccaacatcttaagcgtagaagttgtaaatgacaatgagatgtaccatcttattcctcatagattatcgacgattatactctgtattagttctgtcggaggatgtgttatctctatagataatgacatcaatggcaaaaatattctaacctttcccattgatcatgctgtaatcatatccccactgagtaaatgtgtcgtagttagcaagggtcctacaaccatattggttgttaaagcggatatacctagcaaacgattggtaacatcgtttacaaacgacatactatatgtaaacaatctgtcactgattaattatttgccgttgtctgtattcattattagacgagtcaccgactatttggatagacacatatgcgatcagatatttgctaataataagtggtattcccttataaccatcgacgataagcaatatcctattccatcaaactgtataggtatgtcctctgccaagtacataaattctagcatcgagcaagatactttaatccatgtttgtaacctcgagcatccgttcgactcagtatacaaaaaaatgcagtcgtacaattctctacctatcaaggaacaaatattgtacggtagaattgataatataaatatgagcattagtatttctgtggattaa

SEQ ID NO: 330 - DNA, 189 bp, Vaccinia virus
  VACGL218
atggattcattctcttctctttttatgaaactctgttgtatatctactgataaaactggaagcaaaaaatctgatagaaagaataagaataagatcaaggattatatggaacacgattattataaaataacaatagttcctggttcctcttccacgtctactagctcgtggtattatacacatgcctag

SEQ ID NO: 331 - DNA, 834 bp, Vaccinia virus
  VACGL220
atgtcaagagttagaatatcgttgatatacctctatacgttggttgttataacaactacaaagaccatagagtatacagcatgtaatgataccatcattattccgtgtactatagataatccgacaaagtatattagatggaaattggataaccatgatattttaacttataataaaacttccaagacgacaatattaagtaaatggcatactagtgctagacttcattcgttatcagatagtgatgtctcattgattatggaatataaagatatcttaccaggtacttatacatgcgaggataacactggaataaaatctactgtgaaattagttcaacttcatactaattggtttaatgattaccaaacaatgttgatgtttatctttacgggcattactttattcttattatttctcgagatcacttatacatcgatattcgttgtattttctactaatttaggaatcttacaagtatttggttgtgttattgccatgatagagttatgcggagcatttttgttttatccgtcaatgtttactctcaggcatattatcggattgttgatgatgacattaccgtctatatttcttataattactaaagtattttcattttggttactgtgtaaattatcatgcgctgtacacctcattatctactatcaattggccggatacattttaacggttttgggtttgggattgagtttaaaggaatgtgttgatggaactctgttattatctgggttgggaactattatggtgtctgaacattttagcctgttatttctagtctgctttccgtcaacgcaaagagactattactag

SEQ ID NO: 332 - DNA, 1212 bp, Vaccinia virus
  VACGL221
atgatacctttgttatttattttattctattttgctaacggtattgaatggcataagtttgaaacgagtgaagaaataatttctacttacttattagacgacgtattatacacgggtgttaatggggcggtatacacattttcaaataataaactaaacaaaactggtttaactaataataattatataacaacatctataaaagtagaggatgcggataaggatacattagtatgcggaaccaataacggaaatcccaaatgttggaaaatagacggttcagacgacccaaaacatagaggtagaggatacgctccttatcaaaatagcaaagtaacgataatcagtcacaacggatgtgtactatctgacataaacatatcaaaagaaggaattaaacgatggagaagatttgacggaccatgtggttatgatttattcacggcggataacgtaattccaaaagatggtttacgaggagcattcgtcgataaagacggtacttatgacaaagtttacattcttttcactgatactatcggctcaaagagaattgtcaaaattccgtatatagcacaaatgtgcctaaacgacgaaggtggtccatcatcattgtctagtcatagatggtcgacgtttctcaaagtcgaattagaatgtgatatcgacggaagaagttatagacaaattattcattctagaactataaaaacagataatgatacgatactatatgtattcttcgatagtccttattccaagtccgcattatgtacctattctatgaataccattaaacaatctttttctacgtcaaaattggaaggatatacaaagcaattgccgtctccagctcctggtatatgtttaccagctggaaaagttgttccacataccacgtttgaagtcatagaacaatataatgtactagatgatattataaagcctttatctaaccaacctatcttcgaaggaccgtctggtgttaaatggttcgatataaaggagaaggaaaatgaacatcgggaatatagaatatacttcataaaagaaaattctatatattcgttcgatacaaaatctaaacaaactcgtagctcgcaagtcgatgcgcgactattttcagtaatggtaactgcgaaaccgttatttatagcagatatagggataggagtaggaatgccacaaatgaaaaaaatacttaaaatgtaa

SEQ ID NO: 333 - DNA, 480 bp, Vaccinia virus
  VACGL223
atgaacaaacataagacagattatgctggttatgcttgctgcgtaatatgcggtctaattgtcggaattatttttacagcgacactattaaaagttgtagaacgtaaattagttcatacaccattaatagataaaacgataaaagatgcatatattagagaagattgtcctactgactggataagctataataataaatgtatccatttatctactgatcgaaaaacctgggaggaaggacgtaatgcatgcaaagctctaaattcaaattcggatctaattaagatagagactccaaacgagttaagttttttaagaagccttagacgaggctattgggtaggagaatccgaaatattaaaccagacaaccccatataattttatagctaagaatgccacgaagaatggaactaaaaaacggaaatatatttgtagcacaacgaatactcccaaactgcattcgtgttacactatataa

SEQ ID NO: 334 - DNA, 660 bp, Vaccinia virus
  VACGL224
atgtactcgttattatttattattttgatgtgtataccatttagttttcaaacagtgtatgatgataaatcggtatgcgattctgacaataaagaatatatgggaatcgaagtttacgtagaagcaacactagacgaacacctcagacaaacaacgtgtgaatccgaaatccataaatatggcgcatctgtatcaaacggaggattaaatatttctgttgatttattaaactgttttcttaattttcatacagttggtgtatacactaatcgcgataccgtatacgcgaagtttgctagtttggatccatggactacggaacctataaattctatgacccatgacgatctagtaaaattaacaaaagaatgtatagtggacatttatttaaaatgtgaagtggataaaacaaaggatttcatgaaaactaacggtaatagattaaaaccaagagactttaaaactgttcctccttctgatgtaggaagcatgatagaactacagtctgactattgcgtaaacgatgtgactacatacgtcaaaatatacgatgagtgtggaaacattaaacagcattccattccaacactaagagattattttaccaccaagaatggtcaaccacgtaaaatattaaagaaaaaatttgataattgttaa

SEQ ID NO: 335 - DNA, 402 bp, Vaccinia virus
  VACGL225
atggctgaatggcataaaattatcgaggatatctcaaaaaataataagttcgaggatgccgccatcgttgattacaagactacaaagaatgttctagctgctattcctaacagaacatttgccaagattaatccgggtgaaattattcctctcatcactaatcgtaatattctaaaacctcttattggtcagaaatattgtattgtatatactaactctctaatggatgagaacacgtatgctatggagttgcttactgggtacgcccctgtatctccgatcgttatagcgagaactcataccgcacttatatttttgatgggtaagccaacaacatccagacgtgacgtgtatagaacgtgtagagatcacgctacccgtgtacgtgcaactggtaattaa

SEQ ID NO: 336 - DNA, 585 bp, Vaccinia virus
  VACGL226
atgatgatgatgaaatggataatatccatattgacgatgtcaataatgccggtattggcatacagttcatcgatttttagatttcattcagaggatgtggaattatgttatgggcatttgtattttgataggatctataatgtagtaaatataaaatataatccgcatattccatatagatataattttattaatcgcacgttaaccgtagatgaactagacgataatgtcttttttacacatggttattttttaaaacacaaatatggttcacttaatcctagtttgattgtctcattatcaggaaacttaaaatataatgatatacaatgctcagtaaatgtatcgtgtctcattaaaaatttggcaacgagtacatctactatattaacatctaaacataagacttattctctacatcggtccacgtgtattactataataggatacgattctattatatggtataaagatataaatgacaagtataatgacatctatgattttactgcaatatgtatgctaatagcgtctacattgatagtgaccatatacgtgtttaaaaaaataaaaatgaactcttaa

SEQ ID NO: 337 - DNA, 237 bp, Vaccinia virus
  VACGL227
atgctattagaaatggataaaatcaaaattacggttgattcaaaaattggtaatgttgttaccatatcgtataacttggaaaagataactattgatgtcacacctaaaaagaaaaaagaaaaggatgtattattagcgcaatcagttgctgtcgaagaggcaaaagatgtcaaggtagaagaaaaaaatattatcgatattgaagatgacgatgatatggatgtagaaagcgcgtaa

SEQ ID NO: 338 - DNA, 1041 bp, Vaccinia virus
  VACGL228
atggccgtgtacgcggttactggtggtgccggatttctaggcaggtatatagtaaaactgttaattagtgcagatgatgttcaagaaatcagagtcatagatattgtagaagatccacaaccaataacctcgaaagttaaggttataaactatatacaatgtgatataaacgactttgataaggtgagagaagcgctagatggggtaaatctgattattcatacggctgctctagtggatgtatttggaaaatacaccgataatgaaatcatgaaagtaaactattatggaacacagactattttggcagcttgtgtggacctaggaatcaagtatttgatctatactagtagcatggaagcaataggacccaataaacacggtgatccattcatcggccatgagcataccctttatgatatatcaccaggacatgtatacgcaaaaagtaaacgtatggccgagcaactggttatgaaagccaataattccgtaatcatgaatggagcaaaattgtatacttgttgcctaagacccactggaatttacggagaaggagacaaattgatgaaagtcttttacgagcaatgtaagcaacacggtaacattatgtatcgtacagtcgatgatgacgcggtgcatagccgggtatatgtaggaaatgctgcatggatgcacgtgttggctgcaaaatatatccagtatccgggatctaagattaaaggaaatgcttacttttgctacgattactctccatcgtgttcgtacgatatgtttaatcttctattgatgaaaccattgggaatagaacaaggatctaggattccaagatggatgctaaaaatgtacgcgtgcaagaatgatatgaagagaattctatttagaaaaccatcactactcaacaactatacgttgaagatatccaacactacatttgaggtgcgtaccaacaatgcagaactagatttcaactactcccctatctttgacgtcgatgtggcattcaaacgaacacggaaatggctagaagaatcagaataa

SEQ ID NO: 339 - DNA, 378 bp, Vaccinia virus
  VACGL229
atggctgtttgtataatagaccacgataatatcagaggagttatttactttgaaccagtccatggaaaagataaagttttaggatcagttattggattaaaatccggaacgtatagtttgataattcatcgttacggagatattagtcaaggatgtgattccataggcagtccagaaatatttatcggtaacatctttgtaaacagatatggtgtagcatatgtttatttagatacagatgtaaatatatttacaattattggaaaggcgttatctatttcaaaaaatgatcagagattagcgtgtggagttattggtatttcttacataaatgaaaagataatacattttcttacaattaacgagaatggcgtttga

SEQ ID NO: 340 - DNA, 711 bp, Vaccinia virus
  VACGL230
atggcgtttgatatatcagttaatgcgtctaaaacaataaatgcattagtttacttttctactcagcaaaataaattagtcatacgtaatgaagttaatgatacacactacactgtcgaatttgatagggacaaagtagttgacacgtttatttcatataatagacataatgacaccatagagataagaggggtgcttccagaggaaactaatattggttgcgcggttagtatgacttacttgtataataagtatagttttaaactgattttagcagaatatataagacacagaaatactatatccggcaatatttattcggcattgatgacactagatgatttggctattaaacagtatggagacattgatctattatttaatgagaaacttaaagtagactccgattcgggactatttgactttgtcaactttgtaaaggatatgatatgttgtgattctagaatagtagtagctctatctagtctagtatctaaacattgggaattgacaaataaaaaatataggtgtatggcattagccgaacatatatctgatagtattccaatatctgagctatctagactacgatacaatctatgtaagtatctacgcggacacactgagagcatagaggataaatttgattattttgaagacgatgattcgtctacatgttctgccgtaaccgacagggaaacggatgtataa

SEQ ID NO: 341 - DNA, 759 bp, Vaccinia virus
  VACGL232
atgggtaacaaaaatattaaaccatctaaggaaaatagactgtccatcttgtccaaggataagatggattcatttaagagaggatcttgggcaacgtcatcctttagagaaaagtcgcgtgcaaccatccaaagattttcatctcttagacgagaacatattaaagtagaccatcctgacaagttcctggagttaaagagagagatatatgaaataattcagaaatcatcttctatagatgtggacaaacggactaagctcatgtccaacataaaaacgatgatgataaatccattcatgatcgagggtttaatgacatctttagaaaacttggatcccgataacaagatgagctactcatcggtgatgatattgggagaattcgacatcatcaatataagcgacaatgaggcggcattcgagttcataaacagtctgttgaaatctcttctcttgttaaatactagacaactaaaactcttggaatattccattagtaatgacttgttgtatgcccacataaatgcgttggagtatatcataaaaaatacatttaatgttccagaacggcaactgattctgagaggtcaatacctaactccaattttcagtgatttgttaaagtatgcgggtctaaccataaagtcaaacatacttatgtggaataaacagtttatcaaaccagtatctgacctctatacatctataagactcctttattgtgttacagaatcatataaggtgattggaatgggataa

SEQ ID NO: 342 - DNA, 180 bp, Vaccinia virus
  VACGL233
atgatgttcatacattgtgttgtttttccagatttgtccaatccttcaaaaacgattaatgccccacgagacattttcgtaaacctaacatattttttacaatttatgcgtataataaaactgaaaataaatatatggtcatccgagacgattaggtctacctttatagatcatgggtaa

SEQ ID NO: 343 - DNA, 615 bp, Vaccinia virus
  VACGL234
atgtctcgtggggcattaatcgtttttgaaggattggacaaatctggaaaaacaacacaatgtatgaacatcatggaatcaataccttcaaacacaataaaataccttaactttcctcagagatccactgtcactggaaagatgatagatgactatctaactcgtaaaaaaacctataatgatcatatagttaatctattattttgtgcaaatagatgggagtttgcatcttttatacaagaacaactagaacagggaattactttaatagttgatagatacgcattttctggagtagcgtatgccgccgctaaaggcgcgtcaatgactctcagtaagagttatgaatctggattgcctaaacccgacttagttatattcttggaatctggtagcaaagaaattaatagaaacgtcggtgaggaaatttatgaagatgttacattccaacaaaaggtattacaagaatataaaaaaatgattgaagaaggagatattcattggcaaattatttcttctgaattcgaggaagatgtaaagaaggagttgattaagaatatagttatagaggctatacacacggttactggaccagtggggcaactgtggatgtaa

SEQ ID NO: 344 - DNA, 489 bp, Vaccinia virus
  VACGL235
atggatgaagcatattactctggcaacttggaatcagtactcggatacgtgtccgatatgcataccgaactcgcatcaatatctcaattagttattgccaagatagaaactatagataatgatatattaaacaaggacattgtaaattttatcatgtgtagatcaaacttggataatccatttatctctttcctagatactgtatatactattatagatcaagagaactatcagactgagttgattaattcattagacgacaatgaaattatcgattgtatagttaataagtttatgagcttttataaggataacctagaaaatatagtagatgctatcattactctaaaatatataatgaataatccagattttaaaactacgtatgccgaagtactcggttccagaatagccgatatagatattaaacaagtgatacgtaagaatatactacaattgtctaataatatccgcgaacgatatttgtga

SEQ ID NO: 345 - DNA, 1659 bp, Vaccinia virus
  VACGL236
atgacgtcttttcgtgaatttagaaaattatgctgtgctatatatcacgcatcaggatataaagaaaaatctaaattaattagagactttataacagatagggatgataaatatttgatcattaagctattgcttcccggattagacgatagaatttataacatgaacgataaacaaattataaaattatatagtataatatttaaacaatctcaggaagatatgctacaagatttaggatacggatatataggagacactattaggactttcttcaaagagaacacagaaatccgtccacgagataaaagcattttaactttagaagaagtggatagttttttaactacgttatcatccgtaactaaagaatcgcatcaaataaaattattgactgatgtagcatctgtttgtacatgtaatgatttaaaatgtgtagtcatgcttattgataaagatctaaaaattaaagcgggtcctcggtacgtacttaacgctattagtcctaatgcctatgatgtgtttagaaaatctaataacttgaaagagataatagaaaattcatctaaacaaaatctagactctatatctatttctgttatgactccaattaatcccatgttagcggaatcgtgtgattctgtcaataaggcgtttaaaaaatttccatcaggaatgtttgcggaagtcaaatacgatggtgaaagagtacaagttcataaaaataataacgagtttgccttctttagtagaaacatgaaaccagtactctctcataaagtggattatctcaaagaatacataccgaaagcatttaaaaaagctacgtctatcgtattggattctgaaattgttcttgtagacgaacataatgtaccgctcccgtttggaagtttaggtatacacaaaaagaaagaatataaaaactctaacatgtgtttgttcgtgtttgactgtttgtactttgatggattcgatatgacggacattccattgtacgaacgaagatcttttctcaaagatgttatggttgaaatacccaatagaatagtattctcagagttgacgaatattagtaacgagtctcagttaactgacgtattggatgatgcactaacgagaaaattagaaggattggtcttaaaagatattaatggagtatacgaaccgggaaagagaagatggttaaaaataaagcgagactatttgaacgagggttccatggcagattctgccgatttagtagtactaggtgcctactatggtaaaggagcaaagggtggtatcatggcagtctttctaatgggttgttacgacgatgaatccggtaaatggaagacggttaccaagtgttcaggacacgatgataatacgttaagggagttgcaagaccaattaaagatgattaaaattaacaaggatcccaaaaaaattccagagtggttagtagttaataaaatctatattcccgattttgtagtagaggatccgaaacaatctcagatatgggaaatttcaggagcagagtttacatcttccaagtcccataccgcaaatggaatatccattagatttcctagatttactaggataagagaggataaaacgtggaaagaatctactcatctaaacgatttagtaaacttgactaaatcttaa

SEQ ID NO: 346 - DNA, 1005 bp, Vaccinia virus
  VACGL239
atggatggtgttattgtatactgtctaaacgcgctagtaaaacatggcgaggaaataaatcatataaaaaatgatttcatgattaaaccatgttgtgaaagagtttgtgaaaaagtcaagaacgttcacattggcggacaatctaaaaacaatacagtgattgcagatttgccatatatggataatgcggtatccgatgtatgcaattcactgtataaaaagaatgtatcaagaatatccagatttgctaatttgataaagatagatgacgatgacaagactcctactggtgtatataattattttaaacctaaagatgccattcctgttatcatatctataggaaaggataaagatgtctgtgaactattaatctcatcagacatatcgtgtgcatgcgtggagttaaattcatatcacgtagccattcttcccatggatgtttccttttttaccaaaggaaatgcatcattgattattctcctgtttgatttctctatcgatgcggcacctctcttaagaagtgtaaccgataataatgttattatatctagacaccagcgtctacatgacgagcttccgagttccaattggttcaagttttacataagtataaagtccgactattgttctatattatatatggttgttgatggatctgtgatgcatgcgatagctgataatagaactcacgcaattattagcaaaaatatattagacaatactacgattaacgatgagtgtagatgctgttattttgaaccacagattaggattcttgatagagatgagatgctcaatggatcatcgtgtgatatgaacagacattgtattatgatgaatttacctgatgtaggcgaatttggatctagtatgttggggaaatatgaacctgacatgattaagattgctctttcggtggctggtaatttaataagaaatcgagactacattcccgggagacgaggatatagctactacgtttacggtatagcctctagataa

SEQ ID NO: 347 - DNA, 573 bp, Vaccinia virus
  VACGL240
atggacataaagatagatattagtatttctggtgataaatttacggtgactactaggagggaaaatgaagaaagaaaaaaatatctacctctccaaaaagaaaaaactactgatgttatcaaacctgattatcttgagtacgatgacttgttagatagagatgagatgtttactattctagaggaatattttatgtacagaggtctattaggcctcagaataaaatatggacgactctttaacgaaattaaaaaattcgacaatgatgcggaagaacaattcggtactatagaagaactcaagcagaaacttagattaaattctgaagagggagcagataactttatagattatataaaggtacaaaaacaggatatcgtcaaacttactgtatacgattgcatatctatgataggattgtgtgcatgcgtggtagatgtttggagaaatgagaaactgttttctagatggaaatattgtttacgagcgattaaactgtttattgatgatcacatgcttgataagataaaatctatactgcagaatagactagtatatgtggaaatgtcatag

SEQ ID NO: 348 - DNA, 561 bp, Vaccinia virus
  VACGL241
atggatataaagaatttgctgactgcatgtactattttttacattactacattggctacggcagatatacctacttcgtcactgccacacgctccggtaaacggggcatgtgacgagggagaatatcttgataagaggcataatcaatgttgtaatcagtgtccacctggagaatttgccaaggttagatgtaatggtaacgataacacaaaatgtgaacgctgcccacctcatacatataccgcaatccccaattactctaatggatgtcatcaatgtagaaaatgcccaacaggatcatttgataaggtaaagtgtaccggaacacagaacagtaaatgttcgtgtcttcctggttggtattgcgctactgattcttcacagactgaagattgtcgagattgtataccaaaaaggagatgtccatgcggatactttggtggaatagatgaacaaggaaatcctatttgtaaatcgtgttgtgttggtgaatattgcgactacctacgtaattatagacttgatccatttcctccatgcaaactatctaaatgtaattaa

SEQ ID NO: 349 - DNA, 180 bp, Vaccinia virus
  VACGL243
atgaacaaggaaatcctatttgtaaatcgtgttgtgttggtgaatattgcgactacctacgtaattatagacttgatccatttcctccatgcaaactatctaaatgtaattaattatgattttgatgataatgttaccatacattatatcgctacttggttagtgtattattcagtatga

SEQ ID NO: 350 - DNA, 1695 bp, Vaccinia virus
  VACGL244
atgaataacagcagtgaattgattgctgttattaatggatttagaaatagtggacgattttgtgatattaatatagttattaatgatgaaaggataaacgctcacagactcatcctatctggagcctccgaatatttttccattctgttttccaataattttatcgattctaatgaatacgaagttaatctaagtcatttagattatcaaagtgttaacgatttgatcgattacatttatgggatacctttgagcctaactaacgataacgtgaaatatattctttcaaccgctgattttttacaaattggatctgctattacggagtgtgaaaattacatacttaaaaatctttgttctagaaactgtatcgatttctacatatacgctgataaatataataacaagaaaatagaatcagcgtcgtttaacacaatattacaaaatattttgagactcatcaacgatgaaaactttaaatacttaacagaggaatcaatgataaaaattttaagcgatgatatgttaaatataaaaaatgaggatttcgccccactaattctcattaaatggttagagagtactcaacaaccatgcaccgtcgagttacttaaatgcctcagaatatcattgctttccccacaagttataaaatcactttatagtcatcgactggttagttcaatctacgaatgtataacattcttaaacaatatagcattcttggatgaatcatttcctagataccatagcatcgagttgatatctatcggtataagtaattcgcatgataagatttccataaactgctacaatcataaaaaaaatacatgggaaatgatatcttcacgtagatataggtgtagtttcgcagtggccgtcctggataatattatctatatgatgggtggatatgatcagtccccgtatagaagttcaaaggttatagcgtacaatacatgtacaaattcttggatatatgatataccagagctaaaatatcctcgttctaattgtgggggactggctgatgacgaatacatttattgtataggcggcatacgcgatcaggattcatcgttgacatctagtattgatagatggaagccatcaaaaccatattggcagaagtatgctaaaatgcgcgaaccaaaatgtgatatgggggttgcgatgttaaacggattaatatatgttataggtggaatcgttaaaggtgacacgtgtaccgacgcactagagagtttatcagaagatggatggatgaagcatcaacgtcttccaataaaaatgtccaatatgtcgacgattgttcatgatggcaagatttatatatctggaggttacaacaatagtagtgtagttaatgtaatatcgaatctagtccttagctataattcgatatatgatgaatggaccaaattatcatcattaaacattcctagaattaatcccgctctatggtcagcgcataataaattatatgtaggaggaggaatatctgatgatgttcgaactaatacatctgaaacatacgacaaagaaaaagattgttggacattggataatggtcacgtgttaccacgcaattatataatgtataaatgcgaaccgattaaacataaatatccattggaaaaaacacagtacacgaatgattttctaaagtatttggaaagttttataggtagttga

SEQ ID NO: 351 - DNA, 933 bp, Vaccinia virus
  VACGL245
atgacacgattaccaatacttttgttactaatatcattagtatacgctacaccttttcctcagacatctaaaaaaataggtgatgatgcaactctatcatgtaatcgaaataatacaaatgactacgttgttatgagtgcttggtataaggagcccaattccattattcttttagctgctaaaagcgacgtcttgtattttgataattataccaaggataaaatatcttacgactctccatacgatgatctagttacaactatcacaattaaatcattgactgctagagatgccggtacttatgtatgtgcattctttatgacatcgcctacaaatgacactgataaagtagattatgaagaatactccacagagttgattgtaaatacagatagtgaatcgactatagacataatactatctggatctacacattcaccggaaactagttctgagaaacctgattatatagataattctaattgctcgtcggtattcgaaatcgcgactccggaaccaattactgataatgtagaagatcatacagacaccgtcacatacactagtgatagcattaatacagtaagtgcatcatctggagaatccacaacagacgagactccggaaccaattactgataaagaagaagatcatacagttacagacactgtctcatacactacagtaagtacatcatctggaattgtcactactaaatcaaccaccgatgatacgtacaatgataatgatacagtaccaccaactactgtaggcggtagtacaacctctattagcaattataaaaccaaggactttgtagaaatatttggtattaccgcattaattatattgtcggccgtggcaatattctgtattacgtattatatatgtaataaacgttcacgtaaatacaaaacagagaacaaagtctag

SEQ ID NO: 352 - DNA, 456 bp, Vaccinia virus
  VACGL246
atggaacgagaaggtgtcgattaccattacgttaacagagaggccatctggaagggaatagccgccggaaactttctagaacatactgagtttttaggaaatatttacggaacttctaaaactgctgtgaatacagcggctattaataatcgtatttgtgtgatggatctaaacatcgatggcgttagaagtcttaaaaatacgtacctaatgccttactcggtgtatataagacctacctctcttaaaatggttgagaccaagcttcgttgtagaaacactgaagcggatgatgagattcatcgtcgtgtgatgttggcaaaaactgacatggatgaggcaggtgaagccggtctattcgacactattatcattgaagatgatgtgaatttagcatatagtaagttaattcagatactacaggaccgtattagaatgtattttaacactaattag

SEQ ID NO: 353 - DNA, 903 bp, Vaccinia virus
  VACGL247
atgaactttcaaggacttgtgttaactgacaattgcaaaaatcaatgggtcgttggaccattaataggaaaaggtggattcggtagtatttatactactaatgacaataattatgtagtaaaaatagagcccaaagctaacggatcattatttaccgaacaggcattttatactagagtacttaaaccatccgttatcgaagaatggaaaaaatctcacaatataaagcacgtaggtcttatcacgtgcaaggcatttggtctatacaaatccattaatgtggaatatcgattcttggtaattaatagattaggtgcagatctagatgcggtgatcagagccaataataatagactaccaaaaaggtcggtgatgttgatcggaatcgaaatcttaaataccatacaatttatgcacgagcaaggatattctcacggagatattaaagcgagtaatatagtcttagatcaaatagataagaataaattatatctagtggattacggattggtttctaaattcatgtctaatggcgaacatgttccatttataagaaatccaaataaaatggataacggtactctagaatttacacctatagattcgcataaaggatacgttgtatctagacgtggagatctagaaacacttggatattgtatgattagatggttgggaggtatcttaccatggactaagatatctgaaacaaagaattgtgcattagtaagtgccacaaaacagaaatatgttaacaatactgcgactttgttaatgaccagtttgcaatatgcacctagagaattgctgcaatatattaccatggtaaactctttgacatattttgaggaacccaattacgacaagtttcggcacatattaatgcagggtgtatattattaa

SEQ ID NO: 354 - DNA, 660 bp, Vaccinia virus
  VACGL249
atggcgatgttttacgcacacgctctcggtgggtacgacgagaatcttcatgcctttcctggaatatcatcgactgttgccaatgatgtcaggaaatattctgttgtgtcagtttataataacaagtatgacattgtaaaagacaaatatatgtggtgttacagtcaggtgaacaagagatatattggagcactgctgcctatgtttgagtgcaatgaatatctacaaattggaaatccgatccatgatcaagaaggaaatcaaatctctatcatcacatatcgccacaaaaactactatgctctaagcggaatcgggtacgagagtctagacttgtgtttggaaggagtagggattcatcatcacgtacttgaaacaggaaacgctgtatatggaaaagttcaacatgattattctactatcaaagagaaggccaaagaaatgagtgcacttagtccaggacctatcatcgattaccacgtctggataggagattgtatctgtcaagttactgctgtggacgtacatggaaaggaaattatgaaaatgagattcaaaaagggtgcggtgcttccgatcccaaatctggtaaaagttaaacttggggagaatgatacagaaaatctttcttctactatatcggcggcaccatcgaggtaa

SEQ ID NO: 355 - DNA, 288 bp, Vaccinia virus
  VACGL251
atgcgtatgcacataacagcattctttaccattcacaatatcaaaatgatcatatacaacagaccacatatggcgtatagtttccaaacgtttcatgagtacatgattcacgctgtcttccagagaggtggttacctcgatggtgccgccgatatagtagaagaaagattttctgtatcattctccccaagtttaacttttaccagatttgggatcggaagcaccgcaccctttttgaatctcattttcataatttcctttccatgtacgtccacagcagtaacttga

SEQ ID NO: 356 - DNA, 375 bp, Vaccinia virus
  VACGL252
atgaaacgtttggaaactatacgccatatgtggtctgttgtatatgatcattttgatattgtgaatggtaaagaatgctgttatgtgcatacgcattcatctaatcaaaatcctataccgagtactgtaaaaacaaatttgtacatgaagactatgggatcatgcattcaaatggattccatggaagctctagagtatcttagcgaactgaaggaatcaggtggatggagtcccagaccagaaatgcaggaatttgaatatccagatggagtggaagacactgaatcaattgagagattggcagaggagttcttcaatagatcagaacttcaggctggtgaatcagtcaaatttggtaattctattaattgttaa

SEQ ID NO: 357 - DNA, 537 bp, Vaccinia virus
  VACGL253
atggagtggaagacactgaatcaattgagagattggcagaggagttcttcaatagatcagaacttcaggctggtgaatcagtcaaatttggtaattctattaattgttaaacatacatctgtttcagctaagcaactaagaacacgtatacggcagcagcttccttctatactctcatcttttaccaacacaaagggtggatatttgttcattggagttgataataatacacacaaagtatttggattcacggtgggttacgactacctcagactgatagagaatgatatagaaaagcatatcaaaagacttcgtgttgtgcatttctgtgagaagaaagaggacatcaagtacgcgtgtcgattcatcaaggtatataaacctggggatgagactacctcgacatacgtgtgcgctatcaaagtggaaagatgctgttgtgctgtgtttgcagattggccagaatcatggtatatggatactaatggtatcaagaagtattctccagatgaatgggtgtcacatataaaattttaa

SEQ ID NO: 358 - DNA, 1677 bp, Vaccinia virus
  VACGL255
atggatttttttaaaaaggaaatacttgactggagtatatatttatctcttcattatatagcacgcgtgttttccaatttttccacatcccatataatacaggattataatctcgttcgaacatacgagaaagtggataaaacaatagttgattttttatctaggttgccaaatttattccatattttagaatatggggaaaatattctacatatttattctatggatgatgctaatacgaatattataattttttttctagatagagtattaaatattaataagaacgggtcatttatacacaatctcgggttatcatcatccattaatataaaagaatatgtatatcaattagttaataatgatcatccagataataggataagactaatgcttgaaaatggacgtagaacaagacattttttgtcctatatatcagatacagttaatatctatatatgtattttaataaatcatggattttatatagatgccgaagacagttacggttgtacattattacatagatgtatatatcactataagaaatcagaatcagaatcatacaatgaattaattaagatattgttaaataatggatcagatgtagataaaaaagatacgtacggaaacacaccttttatcctattatgtaaacacgatatcaacaacgtggaattgtttgagatatgtttagagaatgctaatatagactctgtagactttaatagatatacacctcttcattatgtctcatgtcgtaataaatatgattttgtaaagttattaatttctaaaggagcaaatgttaatgcgcgtaataaattcggaactactccattttattgtggaattatacacggtatctcgcttataaaactatatttggaatcagacacagagttagaaatagataatgaacatatagttcgtcatttaataatttttgatgctgttgaatctttagattatctattatccagaggagttattgatattaactatcgtactatatacaacgaaacatctatttacgacgctgtcagttataatgcgtataatacgttggtctatctattaaacaaaaatggtgattttgagacgattactactagtggatgtacatgtatttcggaagcagtcgcaaacaacaacaaaataataatggaagtactattgtctaaacgaccatctttgaaaattatgatacagtctatgatagcaattactaaacataaacagcataatgcagatttattgaaaatgtgtataaaatatactgcgtgtatgaccgattatgatactcttatagatgtacagtcgctacagcaatataaatggtatattttaagatgtttcgatgaaatagatatcatgaagagatgttatataaaaaataaaactgtattccaattagttttttgtatcaaagacattaatactttaatgagatacggtaaacatccttctttcgtgaaatgcactagtctcgacgtatacggaagtcgtgtacgtaatatcatagcatctattagatatcgtcagagattaattagtctattatccaagaagctggatcctggagataaatggtcgtgttttcctaacgaaataaaatataaaatattggaaaactttaacgataacgaactatccacatatctaaaaatcttataa

SEQ ID NO: 359 - DNA, 954 bp, Vaccinia virus
  VACGL256
atgaaaacgatttccgttgttacgttgttatgcgtactacctgctgttgtttattcaacatgtactgtacccactatgaataacgctaaattaacgtctaccgaaacatcgtttaatgataaccagaaagttacgtttacatgtgatcagggatatcattctttggatccaaatgctgtctgtgaaacagataaatggaaatacgaaaatccatgcaaaaaaatgtgcacagtttctgattatgtctctgaactatataataaaccgctatacgaagtgaattccaccatgacactaagttgcaacggcgaaacaaaatattttcgttgcgaagaaaaaaatggaaatacttcttggaatgatactgttacgtgtcctaatgcggaatgtcaacctcttcaattagaacacggatcgtgtcaaccagttaaagaaaaatactcatttggggaatatatgactatcaactgtgatgttggatatgaggttattggtgcttcgtacataagttgtacagctaattcttggaatgttattccatcatgtcaacaaaaatgtgatatgccgtctctatctaacggattaatttccggatctacattttctatcggtggcgttatacatcttagttgtaaaagtggttttacactaacggggtctccatcatccacatgtatcgacggtaaatggaatcccatactcccaatatgtgtacgaactaacgaaaaatttgatccagtggatgatggtcccgacgatgagacagatttgagcaaactctcgaaagacgttgtacaatatgaacaagaaatagaatcgttagaagcaacttatcatataatcatagtggcgttgacaattatgggcgtcatatttttaatctccgttatagtattagtttgttcctgtgacaaaaataatgaccaatataagttccataaattgctaccgtaa

SEQ ID NO: 360 - DNA, 522 bp, Vaccinia virus
  VACGL257
atgtcttcttcagtggatgttgatatctacgatgccgttagagcatttttactcaggcactattataacaagagatttattgtgtatggaagaagtaacgccatattacataatatatacaggctatttacaagatgcgccgttataccgttcgatgatatagtacgtactatgccaaatgaatcacgtgttaaacaatgggtgatggatacacttaatggtataatgatgaatgaacgcgatgtttctgtaagcgttggcaccggaatactattcatggaaatgtttttcgattacaataaaaatagtatcaacaatcaactaatgtatgatataattaatagcgtatctataattctagctaatgagagatatagaagcgcttttaacgacgatggtatatacatccgtagaaatatgattaacaagttgtacggatacgcatctctaactactattggcacgatcgctggaggtgtttgttattatctgttgatgcatctagttagtttgtataaataa

SEQ ID NO: 361 - DNA, 549 bp, Vaccinia virus
  VACGL259
atgtataaaaaactaataacgtttttatttgtaataggtgcattagcatcctattcgaataatgagtacactccgtttaataaactgagtgtaaaactctatatagatggagtagataatatagaaaattcatatactgatgataataatgaattggtgttaaattttaaagagtacacaatttctattattacagagtcatgcgacgtcggatttgattccatagatatagatgttataaacgactataaaattattgatatgtataccattgactcgtctactattcaacgcagaggtcacacgtgtagaatatctaccaaattatcatgccattatgataagtacccttatattcacaaatatgatggtgatgagcgacaatattctattactgcagagggaaaatgctataaaggaataaaatatgaaataagtatgatcaacgatgatactctattgagaaaacatactcttaaaattggatctacttatatatttgatcgtcatggacatagtaatacatattattcaaaatatgatttttaa

SEQ ID NO: 362 - DNA, 819 bp, Vaccinia virus
  VACGL260
atgagatatattataattctcgcagttttgttcattaatagtatacatgctaaaataactagttataagtttgaatccgtcaattttgattccaaaattgaatggactggggatggtctatacaatatatcccttaaaaattatggcatcaagacgtggcaaacaatgtatacaaatgtaccagaaggaacatacgacatatccgcatttccaaagaatgatttcgtatctttctgggttaaatttgaacaaggcgattataaagtggaagagtattgtacgggactatgcgtcgaagtaaaaattggaccaccgactgtaacattgactgaatacgacgaccatatcaatttgtacatcgagcatccgtatgctactagaggtagcaaaaagattcctatttacaaacgcggtgacatgtgtgatatctacttgttgtatacggctaacttcacattcggagattctaaagaaccagtaccatatgatatcgatgactacgattgcacgtctacaggttgcagcatagactttgtcacaacagaaaaagtgtgcgtgacagcacagggagccacagaagggtttctcgaaaaaattactccatggagttcgaaagtatgtctgacacctaaaaagagtgtatatacatgcgcaattagatccaaagaagatgttcccaatttcaaggacaaaatggccagagttatcaagagaaaatttaatacacagtctcaatcttatttaactaaatttctcggtagcacatcaaatgatgttaccacttttcttagcatgcttaacttgactaaatattcataa

SEQ ID NO: 363 - DNA, 174 bp, Vaccinia virus
  VACGL261
atgaacactgcaatcagttctttcgggatagaaatctttggcaattatacacaaccctattttcaatccccatgtttcctcttcagtcttctcacatcgtctaatagacatggagtagatgatagaggggaacagaaggactataatcagggacctcatcttgaaaatggttag

SEQ ID NO: 364 - DNA, 234 bp, Vaccinia virus
  VACGL262
atgaggtccctgattatagtccttctgttcccctctatcatctactccatgtctattagacgatgtgagaagactgaagaggaaacatggggattgaaaatagggttgtgtataattgccaaagatttctatcccgaaagaactgattgcagtgttcatctcccaactgcaagtgaaggattgataactgaaggcaatggattcagggatatacgaaacaccgataaattataa

SEQ ID NO: 365 - DNA, 501 bp, Vaccinia virus
  VACGL263
atggattcagggatatacgaaacaccgataaattataaaaaaagcaatgtgtccgctgtttccgttaataatactattttcgtaactggcggattattcataaataactctaatagcacgatcgtggttaacaatatggaaaaacttgacatttataaagacaaacaatggtcgattatagaaatgcctatggctagggtatatcacggcattgactcgacatttggaatgttatattttgccggaggtctatccgttaccgaacaatatggtaatttagagaaaaacaacgagatatcttgttacaatcctagaacgaataagtggtttgatatttcatatactatttataagatatccatatcatcattgtgtaaactaaataacgtcttctatgtatttagtaaggacattggatatgtggaaaagtatgatggtgcatggaagttagtacatgatcgtctccccgctataaaggcattatcaacttctccttattga

SEQ ID NO: 366 - DNA, 219 bp, Vaccinia virus
  VACGL264
atggatacagatgttacaaatgtagaagatatcataaatgaaatagatagagagaaagaagaaatactaaaaaatgtagaaattgaaaataataaaaacattaacaagaatcatcccaatgaatatattagagaagcactcgttattaataccagtagtaatagtgattccattgataaagaagttatagaatgtatcagtcacgatgtaggaatatag

SEQ ID NO: 367 - DNA, 852 bp, Vaccinia virus
  VACGL265
atggaatccttcaagtattgttttgataacgatggcaagaaatggattatcggaaatactttatattctggtaattcaatactctataaggtcagaaaaaatttcactagttcgttctacaattacgtaatgaagatagatcacaaatcacacaagccattgttgtctgaaatacgattctatatatctgtattggatcctttgactatcgacaactggacacgggaacgtggtataaagtatttggctattccagatctgtatggaattggagaaaccgatgattatatgttcttcgttataaagaattcgggaagagtattcgccccaaaggatactgaatcagtcttcgaagcatgcgtcactatgataaacacgttagagtttatacactctcgaggatttacccatggaaaaatagaaccgaggaatatactgattagaaataaacgtctttcactaattgactattctagaactaacaaactatacaagagtggaaactcacatatagattacaacgaggacatgataacttcaggaaatatcaattatatgtgtgtagacaatcatcttggagcaacagtttcaagacgaggagatttagaaatgttgggatattgcatgatagaatggttcggtggcaaacttccatggaaaaacgaaagtagtataaaagtaataaaacaaaaaaaagaatataaaaaatttatagctactttctttgaggactgttttcctgaaggaaatgaacctctggaattagttagatatatagaattagtatacacgttagattattctcaaactcctaattatgacagactacgtaaactgtttatacaagattga

SEQ ID NO: 368 - DNA, 351 bp, Vaccinia virus
  VACGL266
atgaaaggagagaatgtatttatttctccagcgtcaatctcgtcagtattgacaatactgtattatggagctaatggatccactgctgaacagctatcaaaatatgtagaaacggaggagaacacggataaggttagcgctcagaatatctcattcaaatccatgaataaagtatatgggcgatattctgccgtgtttaaagattcctttttgagaaaaattggcgataagtttcaaactgttgacttcactgattgtcgcactatagatgcaatcaacaagtgtgtagatatctttactgaggggaaaatcaatccactattggatgaaccattgtctcctagcaattag

SEQ ID NO: 369 - DNA, 669 bp, Vaccinia virus
  VACGL267
atgaaccattgtctcctagcaattagtgccgtatactttaaagcaaaatggttgacgccattcgaaaaggaatttaccagtgattatcccttttacgtatctccgacggaaatggtagacgtaagtatgatgtctatgtacggcaaggcatttaatcacgcatctgtaaaagaatcattcggcaacttttcaatcatagaactgccatatgttggagatactagtatgatggtcattcttccagacaagattgatggattagaatccatagaacaaaatctaacagatacaaattttaagaaatggtgtgactttatggatgctatgtttatagatgttcacattcccaagtttaaggtaacaggctcgtataatctggtggatactctagtaaagtcaggactgacagaggtgttcggttcaactggagattatagcaatatgtgtaatttagatgtgagtgtcgacgctatgatccacaaaacgtatatagatgtcaatgaagagtatacagaagcagctgcagcaacttctgtactagtggcagactgtgcatcaacaattacaaatgagttctgtgcagatcatccgttcatctatgtgattaggcatgttgatggaaaaattcttttcgttggtagatattgctctccgacaactaattgttaa

SEQ ID NO: 370 - DNA, 450 bp, Vaccinia virus
  VACGL268
atgacggccaactttagtacccacgtcttttcaccacagcactgtggatgtgacagactgaccagtattgatgacgtcaaacaatgtttgactgaatatatttattggtcgtcctatgcataccgcaacaggcaatgcgctggacaattgtattccacactcctctcttttagagatgatgcggaattagtgttcatcgacattcgcgagctggtaaaaaatatgccgtgggatgatgtcaaagattgtacagaaatcatccgttgttatataccggatgagcaaaaaaccatcagagagatttcggccatcatcggactttgtgcatatgctgctacttactggggaggtgaagaccatcccactagtaacagtctgaacgcattgtttgtgatgcttgagatgctaaattacgtggattataacatcatattccggcgtatgaattga

SEQ ID NO: 371 - DNA, 981 bp, Vaccinia virus
  VACGL270
atgagtatactacctattatatttcttcctatatttttttattcttcattcgttcagacttttaacgcgtctgaatgtatcgacaaagggcaatattttgcatcattcatggagttagaaaacgagccagtaatcttaccatgtcctcaaataaatacgctatcatccggatataatatattagatattttatgggaaaaacgaggagcggataatgatagaattataccgatagataatggtagcaatatgctaattctgaacccgacacaatcagactctggtatttatatatgcattaccacgaacgaaacctactgtgacatgatgtcgttaaatttgacaatcgtgtctgtctcagaatcaaatatagatcttatctcgtatccacaaatagtaaatgagagatctactggcgaaatggtatgtcccaatattaatgcatttattgctagtaacgtaaacgcagatattatatggagcggacatcgacgccttagaaataagagacttaaacaacggacacctggaattattaccatagaagatgttagaaaaaatgatgctggttattatacatgtgttttagaatatatatacggtggcaaaacatataacgtaaccagaattgtaaaattagaggtacgggatagaataataccttctactatgcaattaccagatggcattgtaacttcaataggtagtaatttgactattgcatgcagagtatcgttgagacctcccacaacggacaccgacgtcttttggataagtaatggtatgtattacgaagaagatgatggggacggaaacggtagaataagtgtagcaaataaaatctatatgaccgataagagacgtgttattacatcccggttaaacattaatcctgtcaaggaagaagatgctacaacgtttacgtgtatggcgtttactattcctagcatcagcaaaacagttactgttagtataacgtga

SEQ ID NO: 372 - DNA, 1023 bp, Vaccinia virus
  VACGL272
atgtctagaaagtttatgcaggtgtatgaatatgacagagagcaatatctcgatgagttcattgaagacagatataacgatagttttatcactagtccagaatactatagtgcggaaaaatacatgtgtagatatactacactaaatcacaattgtataaacgtacgacgatgcgcgttagactccaagttattacatgatatcataaccaattgtaaaatatataacaatatagaattagttagggcgacaaaatttgtttattatctggatctgataaaatgtaattgggtatctaaggtaggtgattcggttctatatcccgttatatttataacacatacaagcactagaaatttagataaagtctctgtaaaaacatacaagggcgttaaagtaaaaaaacttaatagatgcgcggatcatgctattgtaattaatccattcgtcaagtttaaactaacgttgccgaacaaaacaagtcatgcaaaggtattggttacattttgtaagttaagaacggatataacgcagatagaggcaccgctttcgggcaatgttttagtttatacatttcctgacattaataaaagaattcctggatatatacatgtcaacatagaaggatgtatcgatggaatgatttatataaattcttcaaagttcgcgtgtgttttaaaactacatagatcaatgtatcgcattccaccctttcctatagatatctgctcttgttgttcacaatatactaacgatgacatagaaattcccattcatgatttaataaaggatgtggcaatttttaaaaataaggagacggtatattatctaaaattaaataataaaactatagctagatttacgtactttaataatatagataccgcaattacacaagaacacgagtatgtcaaaatagcactaggtatagtctgcaagttaatgattaataatatgcatagtatcgtgggagttaatcatagcaatacgttcgtcaattgtttgttggaagataatgtataa

SEQ ID NO: 373 - DNA, 1725 bp, Vaccinia virus
  VACGL273
atgagtcgtcgtctgatttatgttttaaatatcaaccgcaaatcaactcataaaatacaagagaatgaaatatatacatattttagtcattgcaatatagaccatacttctacagaacttgattttgtagttaaaaactatgatctaaacagacgacaacctgtaactgggtatactgcactacactgctatttgtataataattactttacaaacgatgtactgaagatattattaaatcatgacgtaaatgtaacgatgaaaaccagtagcggacgtatgcctgtttatatattgcttactagatgttgtaatatttcacatgatgtagtgatagatatgatagacaaagataaaaaccacttattacatagagactattccaacctattactagagtatataaaatctcgttacatgttattgaaggaagaggatatcgatgagaacatagtatccactttattagataagggaatcgatcctaactttaaacaagacggatatacagcgttacattattattatttgtgtctcgcacacgtttataaactaggtgagtgtagaaaaccgataacgataaaaaaggccaagcgaattatttctttgtttatacaacatggagctaatctaaacgcgttagataattgtggtaatacaccattccatttgtatcttagtattgaaatgtgtaataatattcatatgactaaaatgctgttgacttttaatccgaatttcaaaatatgtaataatcatggattaacgcctatactatgttatataacttccgactacatacaacacgatattcttgttatgttaatacatcactatgaaacaaatgttggagaaatgccgatagatgagcgtcgtatgatcgtattcgagtttatcaaaacatattctacacgtccggcagattcgataacttatttgatgaataggtttaaaaatataaatatttatacccgctatgaaggaaagacattattacacgtagcatgtgaatataataatacacaagtaatagattatcttatacgtatcaacggagatataaatgcgttaaccgacaataacaaacacgctacacaactcattatagataacaaagaaaattccccatataccattaattgtttactgtatatacttagatatattgtagataagaatgtgataagatcgttggtggatcaacttccatctctacctatcttcgatataaaatcatttgagaaattcatatcctactgtatacttttagatgacacattttacgataggcacgttaagaatcgcgattctaaaacgtatcgatacgcattttcaaaatacatgtcgtttgataaatacgatggtataataactaaatgtcacgacgaaacaatgttactcaaactgtccactgttctagacactacactatatgcagttttaagatgtcataattcgagaaagttaagaagatacctcaacgagttaaaaaaatataataacgataagtcctttaaaatatattctaatattatgaatgagagataccttaatgtatattataaagatatgtacgtgtcaaaggtatatgataaactatttcctgttttcacagataaaaattgtctactaacattactaccttcagaaattatatacgaaatattatacatgctgacaattaacgatctttataatatatcgtatccacctaccaaagtatag

SEQ ID NO: 374 - DNA, 1056 bp, Vaccinia virus
  VACGL274
atgacgatgaaaatgatggtacatatatatttcgtatcattattgttattgctattccacagttacgccatagacatcgaaaatgaaatcacagaattcttcaataaaatgagagatactctaccagctaaagactctaaatggttgaatccagcatgtatgttcggaggcacaatgaatgatatagccgctctaggagagccattcagcgcaaagtgtcctcctattgaagacagtcttttatcgcacagatataaagactatgtggttaaatgggagaggctagaaaagaatagacggcgacaggtttctaataaacgtgttaaacatggtgatttatggatagccaactatacatctaaattcagtaaccgtaggtatttgtgcaccgtaactacaaagaatggtgactgtgttcagggtatagttagatctcatattaaaaaacctccttcatgcattccaaaaacatatgaactaggtactcatgataagtatggcatagacttatactgtggaattctttacgcaaaacattataataatataacttggtataaagataataaggaaattaatatcgacgacattaagtattcacaaacgggaaaggaattaattattcataatccagagttagaagatagcggaagatacgactgttacgttcattacgacgacgttagaatcaagaatgatatcgtagtatcaagatgtaaaatacttacggttataccgtcacaagaccacaggtttaaactaatactagatccgaaaatcaacgtaacgataggagaacctgccaatataacatgcactgctgtgtcaacgtcattattgatcgacgatgtactgattgaatgggaaaatccatccggatggcttataggattcgattttgatgtatactctgttttaactagtagaggcggtatcaccgaggcgaccttgtactttgaaaatgttactgaagaatatataggtaatacatataaatgtcgtggacacaactattattttgaaaaaacccttacaactacagtagtattggagtaa

SEQ ID NO: 375 - DNA, 420 bp, Vaccinia virus
  VACGL275
atggatgaagatacgcgactatctaggtatttgtatctcaccgatagagaacatataaatgtagactctattaaacagttgtgtaaaatatcagatcctaatgcatgttatagatgtggatgtacggctttacatgagtacttttataattatagatcagtcaacggaaaatacaagtatagatacaacggttactatcaatattattcatctagcgattatgaaaattataatgaatattattatgatagaactggtatgaacagtgagagtgataatatatcaatcaaaacagaatatgaattctatgatgaaacacaagatcaaagtacacaactagtaggttacgacattaaactcaaaaccaatgaggatgattttatggctatgatagatcagtgggtgtccatgattatatag

SEQ ID NO: 376 - DNA, 375 bp, Vaccinia virus; identical to SEQ ID NO: 171
  VACGL277

SEQ ID NO: 377 - DNA, 189 bp, Vaccinia virus; identical to SEQ ID NO: 170
  VACGL278

SEQ ID NO: 378 - DNA, 252 bp, Vaccinia virus; identical to SEQ ID NO: 169
  VACGL279

SEQ ID NO: 379 - DNA, 996 bp, Vaccinia virus; identical to SEQ ID NO: 168
  VACGL280

SEQ ID NO: 380 - DNA, 417 bp, Vaccinia virus; identical to SEQ ID NO: 167
  VACGL282

SEQ ID NO: 381 - DNA, 1065 bp, Vaccinia virus; identical to SEQ ID NO: 166
  VACGL283

SEQ ID NO: 382 - DNA, 261 bp, Vaccinia virus; identical to SEQ ID NO: 165
  VACGL284

SEQ ID NO: 383 - DNA, 966 bp, Vaccinia virus; identical to SEQ ID NO: 164
  VACGL285

SEQ ID NO: 384 - DNA, 150 bp, Vaccinia virus; identical to SEQ ID NO: 163
  VACGL286

SEQ ID NO: 385 - DNA, 369 bp, Vaccinia virus; identical to SEQ ID NO: 161
  VACGL287

SEQ ID NO: 386 - DNA, 192 bp, Vaccinia virus; identical to SEQ ID NO: 160
  VACGL288

SEQ ID NO: 387 - DNA, 777 bp, Vaccinia virus; identical to SEQ ID NO: 159
  VACGL289

SEQ ID NO: 388 - DNA, 3060 bp, Artificial Sequence
  recombinant lacZ sequence
atgggagatcccgtcgttttacaacgtcgtgactgggaaaaccctggcgttacccaacttaatcgccttgcagcacatccccctttcgccagctggcgtaatagcgaagaggcccgcaccgatcgcccttcccaacagttgcgcagcctgaatggcgaatggcgctttgcctggtttccggcaccagaagcggtgccggaaagctggctggagtgcgatcttcctgaggccgatactgtcgtcgtcccctcaaactggcagatgcacggttacgatgcgcccatctacaccaacgtgacctatcccattacggtcaatccgccgtttgttcccacggagaatccgacgggttgttactcgctcacatttaatgttgatgaaagctggctacaggaaggccagacgcgaattatttttgatggcgttaactcggcgtttcatctgtggtgcaacgggcgctgggtcggttacggccaggacagtcgtttgccgtctgaatttgacctgagcgcatttttacgcgccggagaaaaccgcctcgcggtgatggtgctgcgctggagtgacggcagttatctggaagatcaggatatgtggcggatgagcggcattttccgtgacgtctcgttgctgcataaaccgactacacaaatcagcgatttccatgttgccactcgctttaatgatgatttcagccgcgctgtactggaggctgaagttcagatgtgcggcgagttgcgtgactacctacgggtaacagtttctttatggcagggtgaaacgcaggtcgccagcggcaccgcgcctttcggcggtgaaattatcgatgagcgtggtggttatgccgatcgcgtcacactacgtctgaacgtcgaaaacccgaaactgtggagcgccgaaatcccgaatctctatcgtgcggtggttgaactgcacaccgccgacggcacgctgattgaagcagaagcctgcgatgtcggtttccgcgaggtgcggattgaaaatggtctgctgctgctgaacggcaagccgttgctgattcgaggcgttaaccgtcacgagcatcatcctctgcatggtcaggtcatggatgagcagacgatggtgcaggatatcctgctgatgaagcagaacaactttaacgccgtgcgctgttcgcattatccgaaccatccgctgtggtacacgctgtgcgaccgctacggcctgtatgtggtggatgaagccaatattgaaacccacggcatggtgccaatgaatcgtctgaccgatgatccgcgctggctaccggcgatgagcgaacgcgtaacgcgaatggtgcagcgcgatcgtaatcacccgagtgtgatcatctggtcgctggggaatgaatcaggccacggcgctaatcacgacgcgctgtatcgctggatcaaatctgtcgatccttcccgcccggtgcagtatgaaggcggcggagccgacaccacggccaccgatattatttgcccgatgtacgcgcgcgtggatgaagaccagcccttcccggctgtgccgaaatggtccatcaaaaaatggctttcgctacctggagagacgcgcccgctgatcctttgcgaatacgcccacgcgatgggtaacagtcttggcggtttcgctaaatactggcaggcgtttcgtcagtatccccgtttacagggcggcttcgtctgggactgggtggatcagtcgctgattaaatatgatgaaaacggcaacccgtggtcggcttacggcggtgattttggcgatacgccgaacgatcgccagttctgtatgaacggtctggtctttgccgaccgcacgccgcatccagcgctgacggaagcaaaacaccagcagcagtttttccagttccgtttatccgggcaaaccatcgaagtgaccagcgaatacctgttccgtcatagcgataacgagctcctgcactggatggtggcgctggatggtaagccgctggcaagcggtgaagtgcctctggatgtcgctccacaaggtaaacagttgattgaactgcctgaactaccgcagccggagagcgccgggcaactctggctcacagtacgcgtagtgcaaccgaacgcgaccgcatggtcagaagccgggcacatcagcgcctggcagcagtggcgtctggcggaaaacctcagtgtgacgctccccgccgcgtcccacgccatcccgcatctgaccaccagcgaaatggatttttgcatcgagctgggtaataagcgttggcaatttaaccgccagtcaggctttctttcacagatgtggattggcgataaaaaacaactgctgacgccgctgcgcgatcagttcacccgtgcaccgctggataacgacattggcgtaagtgaagcgacccgcattgaccctaacgcctgggtcgaacgctggaaggcggcgggccattaccaggccgaagcagcgttgttgcagtgcacggcagatacacttgctgatgcggtgctgattacgaccgctcacgcgtggcagcatcaggggaaaaccttatttatcagccggaaaacctaccggattgatggtagtggtcaaatggcgattaccgttgatgttgaagtggcgagcgatacaccgcatccggcgcggattggcctgaactgccagctggcgcaggtagcagagcgggtaaactggctcggattagggccgcaagaaaactatcccgaccgccttactgccgcctgttttgaccgctgggatctgccattgtcagacatgtataccccgtacgtcttcccgagcgaaaacggtctgcgctgcgggacgcgcgaattgaattatggcccacaccagtggcgcggcgacttccagttcaacatcagccgctacagtcaacagcaactgatggaaaccagccatcgccatctgctgcacgcggaagaaggcacatggctgaatatcgacggtttccatatggggattggtggcgacgactcctggagcccgtcagtatcggcggaattccagctgagcgccggtcgctaccattaccagttggtctggtgtcaaaaataa

SEQ ID NO: 389 - DNA, 1812 bp, Artificial Sequence
  Recombinant gusA
atgttacgtcctgtagaaaccccaacccgtgaaatcaaaaaactcgacggcctgtgggcattcagtctggatcgcgaaaactgtggaattgatcagcgttggtgggaaagcgcgttacaagaaagccgggcaattgctgtgccaggcagttttaacgatcagttcgccgatgcagatattcgtaattatgcgggcaacgtctggtatcagcgcgaagtctttataccgaaaggttgggcaggccagcgtatcgtgctgcgtttcgatgcggtcactcattacggcaaagtgtgggtcaataatcaggaagtgatggagcatcagggcggctatacgccatttgaagccgatgtcacgccgtatgttattgccgggaaaagtgtacgtatcaccgtttgtgtgaacaacgaactgaactggcagactatcccgccgggaatggtgattaccgacgaaaacggcaagaaaaagcagtcttacttccatgatttctttaactatgccggaatccatcgcagcgtaatgctctacaccacgccgaacacctgggtggacgatatcaccgtggtgacgcatgtcgcgcaagactgtaaccacgcgtctgttgactggcaggtggtggccaatggtgatgtcagcgttgaactgcgtgatgcggatcaacaggtggttgcaactggacaaggcactagcgggactttgcaagtggtgaatccgcacctctggcaaccgggtgaaggttatctctatgaactgtgcgtcacagccaaaagccagacagagtgtgatatctacccgcttcgcgtcggcatccggtcagtggcagtgaagggcgaacagttcctgattaaccacaaaccgttctactttactggctttggtcgtcatgaagatgcggacttgcgtggcaaaggattcgataacgtgctgatggtgcacgaccacgcattaatggactggattggggccaactcctaccgtacctcgcattacccttacgctgaagagatgctcgactgggcagatgaacatggcatcgtggtgattgatgaaactgctgctgtcggctttaacctctctttaggcattggtttcgaagcgggcaacaagccgaaagaactgtacagcgaagaggcagtcaacggggaaactcagcaagcgcacttacaggcgattaaagagctgatagcgcgtgacaaaaaccacccaagcgtggtgatgtggagtattgccaacgaaccggatacccgtccgcaaggtgcacgggaatatttcgcgccactggcggaagcaacgcgtaaactcgacccgacgcgtccgatcacctgcgtcaatgtaatgttctgcgacgctcacaccgataccatcagcgatctctttgatgtgctgtgcctgaaccgttattacggatggtatgtccaaagcggcgatttggaaacggcagagaaggtactggaaaaagaacttctggcctggcaggagaaactgcatcagccgattatcatcaccgaatacggcgtggatacgttagccgggctgcactcaatgtacaccgacatgtggagtgaagagtatcagtgtgcatggctggatatgtatcaccgcgtctttgatcgcgtcagcgccgtcgtcggtgaacaggtatggaatttcgccgattttgcgacctcgcaaggcatattgcgcgttggcggtaacaagaaagggatcttcactcgcgaccgcaaaccgaagtcggcggcttttctgctgcaaaaacgctggactggcatgaacttcggtgaaaaaccgcagcagggaggcaaacaatga

SEQ ID NO: 390 - DNA, 1665 bp, Artificial Sequence
  recombinant ruc-gfp
atgacttcgaaagtttatgatccagaacaaaggaaacggatgataactggtccgcagtggtgggccagatgtaaacaaatgaatgttcttgattcatttattaattattatgattcagaaaaacatgcagaaaatgctgttatttttttacatggtaacgcggcctcttcttatttatggcgacatgttgtgccacatattgagccagtagcgcggtgtattataccagatcttattggtatgggcaaatcaggcaaatctggtaatggttcttataggttacttgatcattacaaatatcttactgcatggtttgaacttcttaatttaccaaagaagatcatttttgtcggccatgattggggtgcttgtttggcatttcattatagctatgagcatcaagataagatcaaagcaatagttcacgctgaaagtgtagtagatgtgattgaatcatgggatgaatggcctgatattgaagaagatattgcgttgatcaaatctgaagaaggagaaaaaatggttttggagaataacttcttcgtggaaaccatgttgccatcaaaaatcatgagaaagttagaaccagaagaatttgcagcatatcttgaaccattcaaagagaaaggtgaagttcgtcgtccaacattatcatggcctcgtgaaatcccgttagtaaaaggtggtaaacctgacgttgtacaaattgttaggaattataatgcttatctacgtgcaagtgatgatttaccaaaaatgtttattgaatcggatccaggattcttttccaatgctattgttgaaggcgccaagaagtttcctaatactgaatttgtcaaagtaaaaggtcttcatttttcgcaagaagatgcacctgatgaaatgggaaaatatatcaaatcgttcgttgagcgagttctcaaaaatgaacaagcggccgccgccaccatgagcaagggcgaggaactgttcactggcgtggtcccaattctcgtggaactggatggcgatgtgaatgggcacaaattttctgtcagcggagagggtgaaggtgatgccacatacggaaagctcaccctgaaattcatctgcaccactggaaagctccctgtgccatggccaacactggtcactaccttcacctatggcgtgcagtgcttttccagatacccagaccatatgaagcagcatgactttttcaagagcgccatgcccgagggctatgtgcaggagagaaccatctttttcaaagatgacgggaactacaagacccgcgctgaagtcaagttcgaaggtgacaccctggtgaatagaatcgagctgaagggcattgactttaaggaggatggaaacattctcggccacaagctggaatacaactataactcccacaatgtgtacatcatggccgacaagcaaaagaatggcatcaaggtcaacttcaagatcagacacaacattgaggatggatccgtgcagctggccgaccattatcaacagaacactccaatcggcgacggccctgtgctcctcccagacaaccattacctgtccacccagtctgccctgtctaaagatcccaacgaaaagagagaccacatggtcctgctggagtttgtgaccgctgctgggatcacacatggcatggacgagctgtacaagtga

SEQ ID NO: 391 - DNA, 921 bp, Artificial Sequence
  hMCP-1 cDNA
  misc_feature 883: n is a or g or c or t
ggggtagatttgtaacacgattcactatagggcggccgcgaaatcggcacgaggtaacccagaacatccaattctcaaactgaagctcgcactctcgcctccagcatgaaagtctctgccgcccttctgtgcctgctgctcatagcagccaccttcattccccaagggctcgctcagccagatgcaatcaatgccccagtcacctgctgttataacttcaccaataggaagatctcagtgcagaggctcgcgagctatagaagaatcaccagcagcaagtgtcccaaagaagctgtgatcttcaagaccattgtggccaaggagatctgtgctgaccccaagcagaagtgggttcaggattccatggaccacctggacaagcaaacccaaactccgaagacttgaacactcactccacaacccaagaatctgcagctaacttattttcccctagctttccccagacaccctgttttattttattataatgaattttgtttgttgatgtgaaacattatgccttaagtaatgttaattcttatttaagctattgatgttttaagttatctttcatggtactagcgctttctacatacagagacttgggggaaattgcttttcctcttgaaccacagttctaccccctgggatgctttgagggtctttgcaagatcattaatacaaagaattttttttaacattcccaagcattgctaaaataatattgcggaaatgaatattttggaaccattaccccaaacaaatatattttttgtacaaaaaaaaaaaaaaaaccttacttctaaattgagccccggcccattctttcccctgaccacacccccgtgggctccctgtgaacctcccccaatgcccttcctgnccctgaaagttgccattccatgcgccacacccctggct

SEQ ID NO: 392 - DNA, 32 bp, Artificial Sequence
  hMCP1-5 primer
gtcgacgccaccatgaaagtctctgccgccct

SEQ ID NO: 393 - DNA, 33 bp, Artificial Sequence
  hMCP1-3 primer
ttaattaatcaagtcttcggagtttgggtttgc

SEQ ID NO: 394 - DNA, 3519 bp, Artificial Sequence
  pCR- Blunt II-TOPO vector
agcgcccaatacgcaaaccgcctctccccgcgcgttggccgattcattaatgcagctggcacgacaggtttcccgactggaaagcgggcagtgagcgcaacgcaattaatgtgagttagctcactcattaggcaccccaggctttacactttatgcttccggctcgtatgttgtgtggaattgtgagcggataacaatttcacacaggaaacagctatgaccatgattacgccaagctatttaggtgacactatagaatactcaagctatgcatcaagcttggtaccgagctcggatccactagtaacggccgccagtgtgctggaattcgcccttaagggcgaattctgcagatatccatcacactggcggccgctcgagcatgcatctagagggcccaattcgccctatagtgagtcgtattacaattcactggccgtcgttttacaacgtcgtgactgggaaaaccctggcgttacccaacttaatcgccttgcagcacatccccctttcgccagctggcgtaatagcgaagaggcccgcaccgatcgcccttcccaacagttgcgcagcctatacgtacggcagtttaaggtttacacctataaaagagagagccgttatcgtctgtttgtggatgtacagagtgatattattgacacgccggggcgacggatggtgatccccctggccagtgcacgtctgctgtcagataaagtctcccgtgaactttacccggtggtgcatatcggggatgaaagctggcgcatgatgaccaccgatatggccagtgtgccggtctccgttatcggggaagaagtggctgatctcagccaccgcgaaaatgacatcaaaaacgccattaacctgatgttctggggaatataaatgtcaggcatgagattatcaaaaaggatcttcacctagatccttttcacgtagaaagccagtccgcagaaacggtgctgaccccggatgaatgtcagctactgggctatctggacaagggaaaacgcaagcgcaaagagaaagcaggtagcttgcagtgggcttacatggcgatagctagactgggcggttttatggacagcaagcgaaccggaattgccagctggggcgccctctggtaaggttgggaagccctgcaaagtaaactggatggctttctcgccgccaaggatctgatggcgcaggggatcaagctctgatcaagagacaggatgaggatcgtttcgcatgattgaacaagatggattgcacgcaggttctccggccgcttgggtggagaggctattcggctatgactgggcacaacagacaatcggctgctctgatgccgccgtgttccggctgtcagcgcaggggcgcccggttctttttgtcaagaccgacctgtccggtgccctgaatgaactgcaagacgaggcagcgcggctatcgtggctggccacgacgggcgttccttgcgcagctgtgctcgacgttgtcactgaagcgggaagggactggctgctattgggcgaagtgccggggcaggatctcctgtcatctcaccttgctcctgccgagaaagtatccatcatggctgatgcaatgcggcggctgcatacgcttgatccggctacctgcccattcgaccaccaagcgaaacatcgcatcgagcgagcacgtactcggatggaagccggtcttgtcgatcaggatgatctggacgaagagcatcaggggctcgcgccagccgaactgttcgccaggctcaaggcgagcatgcccgacggcgaggatctcgtcgtgacccatggcgatgcctgcttgccgaatatcatggtggaaaatggccgcttttctggattcatcgactgtggccggctgggtgtggcggaccgctatcaggacatagcgttggctacccgtgatattgctgaagagcttggcggcgaatgggctgaccgcttcctcgtgctttacggtatcgccgctcccgattcgcagcgcatcgccttctatcgccttcttgacgagttcttctgaattattaacgcttacaatttcctgatgcggtattttctccttacgcatctgtgcggtatttcacaccgcatacaggtggcacttttcggggaaatgtgcgcggaacccctatttgtttatttttctaaatacattcaaatatgtatccgctcatgagacaataaccctgataaatgcttcaataatagcacgtgaggagggccaccatggccaagttgaccagtgccgttccggtgctcaccgcgcgcgacgtcgccggagcggtcgagttctggaccgaccggctcgggttctcccgggacttcgtggaggacgacttcgccggtgtggtccgggacgacgtgaccctgttcatcagcgcggtccaggaccaggtggtgccggacaacaccctggcctgggtgtgggtgcgcggcctggacgagctgtacgccgagtggtcggaggtcgtgtccacgaacttccgggacgcctccgggccggccatgaccgagatcggcgagcagccgtgggggcgggagttcgccctgcgcgacccggccggcaactgcgtgcacttcgtggccgaggagcaggactgacacgtgctaaaacttcatttttaatttaaaaggatctaggtgaagatcctttttgataatctcatgaccaaaatcccttaacgtgagttttcgttccactgagcgtcagaccccgtagaaaagatcaaaggatcttcttgagatcctttttttctgcgcgtaatctgctgcttgcaaacaaaaaaaccaccgctaccagcggtggtttgtttgccggatcaagagctaccaactctttttccgaaggtaactggcttcagcagagcgcagataccaaatactgtccttctagtgtagccgtagttaggccaccacttcaagaactctgtagcaccgcctacatacctcgctctgctaatcctgttaccagtggctgctgccagtggcgataagtcgtgtcttaccgggttggactcaagacgatagttaccggataaggcgcagcggtcgggctgaacggggggttcgtgcacacagcccagcttggagcgaacgacctacaccgaactgagatacctacagcgtgagctatgagaaagcgccacgcttcccgaagggagaaaggcggacaggtatccggtaagcggcagggtcggaacaggagagcgcacgagggagcttccagggggaaacgcctggtatctttatagtcctgtcgggtttcgccacctctgacttgagcgtcgatttttgtgatgctcgtcaggggggcggagcctatggaaaaacgccagcaacgcggcctttttacggttcctgggcttttgctggccttttgctcacatgttctttcctgcgttatcccctgattctgtggataaccgtattaccgcctttgagtgagctgataccgctcgccgcagccgaacgaccgagcgcagcgagtcagtgagcgaggaagcggaag

SEQ ID NO: 395 - DNA, 5848 bp, Artificial Sequence
  TK-SL-hMCP1 transfer vector
agcgcccaatacgcaaaccgcctctccccgcgcgttggccgattcattaatgcagctggcacgacaggtttcccgactggaaagcgggcagtgagcgcaacgcaattaatgtgagttagctcactcattaggcaccccaggctttacactttatgcttccggctcgtatgttgtgtggaattgtgagcggataacaatttcacacaggaaacagctatgaccatgattacgccaagctttgttacagatggaagggtcaaacttaataaaggatatttgttcgactttgtgattagtttgatgcgattcaaaaaagaatcctctctagctaccaccgcaatagatcctgttagatacatagatcctcgtcgtgatatcgcattttctaacgtgatggatatattaaagtcgaataaagtgaacaataattaattctttattgtcatcatgaacggcggacatattcagttgataatcggccccatgttttcaggtaaaagtacagaattaattagacgagttagacgttatcaaatagctcaatataaatgcgtgactataaaatattctaacgataatagatacggaacgggactatggacgcatgataagaataattttgaagcattggaagcaactaaactatgtgatgtcttggaatcaattacagatttctccgtgataggtatcgatgaaggacagttctttccagacattgtttaattctgtgagcgtatggcaaacggtaccgagctcttttttttttttttttttttggcatataaataagtcgacgccaccatgaaagtctctgccgcccttctgtgcctgctgctcatagcagccaccttcattccccaagggctcgctcagccagatgcaatcaatgccccagtcacctgctgttataacttcaccaataggaagatctcagtgcagaggctcgcgagctatagaagaatcaccagcagcaagtgtcccaaagaagctgtgatcttcaagaccattgtggccaaggagatctgtgctgaccccaagcagaagtgggttcaggattccatggaccacctggacaagcaaacccaaactccgaagacttgattaattaatttttatcgatctaattcaacaatgtctggagagctcggatccttctgtgagcgtatggcaaacgaaggaaaaatagttatagtagccgcactcgatgggacatttcaacgtaaaccgtttaataatattttgaatcttattccattatctgaaatggtggtaaaactaactgctgtgtgtatgaaatgctttaaggaggcttccttttctaaacgattgggtgaggaaaccgagatagagataataggaggtaatgatatgtatcaatcggtgtgtagaaagtgttacgtcggctcataatattatattttttatctaaaaaactaaaaataaacattgattaaattttaatataatacttaaaaatggatgttgtgtcgttagataaaccgtttatgtattttgaggaaattgataatgagttagattacgaaccagaaagtgcaaatgaggtcgcaaaaaaactgccgtatcaaggacagttaaaactattactaggagaattattttttcttagtaagttacagcgacacggtatattagatggtgccaccgtagtgtactagttaacggccgccagtgtgctggaattctagaaaagtagaaaatatattctaatttattgcacgggatgagcgaaaaatacatcgtcacctgggacatgttgcagatccatgcacgtaaactcgcaagccgactgatgccttctgaacaatggaaaggcattattgccgtaagccgtggcggtctggtaccgggtgcgttactggcgcgtgaactgggtattcgtcatgtcgataccgtttgtatttccagctacgatcacgacaaccagcgcgagcttaaagtgctgaaacgcgcagaaggcgatggcgaaggcttcatcgttattgatgacctggtggataccggtggtactgcggttgcgattcgtgaaatgtatccaaaagcgcactttgtcaccatcttcgcaaaaccggctggtcgtccgctggttgatgactatgttgttgatatcccgcaagatacctggattgaacagccgtgggatatgggcgtcgtattcgtcccgccaatctccggtcgctaaggatcagcttggcgtaatcaagccgaattctgcagatatccatcacactggcggccgctcgagcatgcatctagagggcccaattcgccctatagtgagtcgtattacaattcactggccgtcgttttacaacgtcgtgactgggaaaaccctggcgttacccaacttaatcgccttgcagcacatccccctttcgccagctggcgtaatagcgaagaggcccgcaccgatcgcccttcccaacagttgcgcagcctgaatggcgaatggacgcgccctgtagcggcgcattaagcgcggcgggtgtggtggttacgcgcagcgtgaccgctacacttgccagcgccctagcgcccgctcctttcgctttcttcccttcctttctcgccacgttcgccggctttccccgtcaagctctaaatcgggggctccctttagggttccgatttagtgctttacggcacctcgaccccaaaaaacttgattagggtgatggttcacgtagtgggccatcgccctgatagacggtttttcgccctttgacgttggagtccacgttctttaatagtggactcttgttccaaactggaacaacactcaaccctatctcggtctattcttttgatttataagggattttgccgatttcggcctattggttaaaaaatgagctgatttaacaaaaatttaacgcgaattttaacaaaattcagggcgcaagggctgctaaaggaagcggaacacgtagaaagccagtccgcagaaacggtgctgaccccggatgaatgtcagctactgggctatctggacaagggaaaacgcaagcgcaaagagaaagcaggtagcttgcagtgggcttacatggcgatagctagactgggcggttttatggacagcaagcgaaccggaattgccagctggggcgccctctggtaaggttgggaagccctgcaaagtaaactggatggctttcttgccgccaaggatctgatggcgcaggggatcaagatctgatcaagagacaggatgaggatcgtttcgcatgattgaacaagatggattgcacgcaggttctccggccgcttgggtggagaggctattcggctatgactgggcacaacagacaatcggctgctctgatgccgccgtgttccggctgtcagcgcaggggcgcccggttctttttgtcaagaccgacctgtccggtgccctgaatgaactgcaggacgaggcagcgcggctatcgtggctggccacgacgggcgttccttgcgcagctgtgctcgacgttgtcactgaagcgggaagggactggctgctattgggcgaagtgccggggcaggatctcctgtcatcccaccttgctcctgccgagaaagtatccatcatggctgatgcaatgcggcggctgcatacgcttgatccggctacctgcccattcgaccaccaagcgaaacatcgcatcgagcgagcacgtactcggatggaagccggtcttgtcgatcaggatgatctggacgaagagcatcaggggctcgcgccagccgaactgttcgccaggctcaaggcgcgcatgcccgacggcgaggatctcgtcgtgacccatggcgatgcctgcttgccgaatatcatggtggaaaatggccgcttttctggattcatcgactgtggccggctgggtgtggcggaccgctatcaggacatagcgttggctacccgtgatattgctgaagagcttggcggcgaatgggctgaccgcttcctcgtgctttacggtatcgccgctcccgattcgcagcgcatcgccttctatcgccttcttgacgagttcttctgaattgaaaaaggaagagtatgagtattcaacatttccgtgtcgcccttattcccttttttgcggcattttgccttcctgtttttgctcacccagaaacgctggtgaaagtaaaagatgctgaagatcagttgggtgcacgagtgggttacatcgaactggatctcaacagcggtaagatccttgagagttttcgccccgaagaacgttttccaatgatgagcacttttaaagttctgctatgtggcgcggtattatcccgtattgacgccgggcaagagcaactcggtcgccgcatacactattctcagaatgacttggttgagtactcaccagtcacagaaaagcatcttacggatggcatgacagtaagagaattatgcagtgctgccataaccatgagtgataacactgcggccaacttacttctgacaacgatcggaggaccgaaggagctaaccgcttttttgcacaacatgggggatcatgtaactcgccttgatcgttgggaaccggagctgaatgaagccataccaaacgacgagcgtgacaccacgatgcctgtagcaatggcaacaacgttgcgcaaactattaactggcgaactacttactctagcttcccggcaacaattaatagactggatggaggcggataaagttgcaggaccacttctgcgctcggcccttccggctggctggtttattgctgataaatctggagccggtgagcgtgggtctcgcggtatcattgcagcactggggccagatggtaagccctcccgtatcgtagttatctacacgacggggagtcaggcaactatggatgaacgaaatagacagatcgctgagataggtgcctcactgattaagcattggtaactgtcagaccaagtttactcatatatactttagattgatttaaaacttcatttttaatttaaaaggatctaggtgaagatcctttttgataatctcatgaccaaaatcccttaacgtgagttttcgttccactgagcgtcagaccccgtagaaaagatcaaaggatcttcttgagatcctttttttctgcgcgtaatctgctgcttgcaaacaaaaaaaccaccgctaccagcggtggtttgtttgccggatcaagagctaccaactctttttccgaaggtaactggcttcagcagagcgcagataccaaatactgttcttctagtgtagccgtagttaggccaccacttcaagaactctgtagcaccgcctacatacctcgctctgctaatcctgttaccagtggctgctgccagtggcgataagtcgtgtcttaccgggttggactcaagacgatagttaccggataaggcgcagcggtcgggctgaacggggggttcgtgcacacagcccagcttggagcgaacgacctacaccgaactgagatacctacagcgtgagctatgagaaagcgccacgcttcccgaagggagaaaggcggacaggtatccggtaagcggcagggtcggaacaggagagcgcacgagggagcttccagggggaaacgcctggtatctttatagtcctgtcgggtttcgccacctctgacttgagcgtcgatttttgtgatgctcgtcaggggggcggagcctatggaaaaacgccagcaacgcggcctttttacggttcctggccttttgctggccttttgctcacatgttctttcctgcgttatcccctgattctgtggataaccgtattaccgcctttgagtgagctgataccgctcgccgcagccgaacgttgtttaattctgtgagcgtatggcaaacg

SEQ ID NO: 396 - DNA, 306 bp, Artificial Sequence
  DNA encoding hMCP-1 protein
gccaccatgaaagtctctgccgcccttctgtgcctgctgctcatagcagccaccttcattccccaagggctcgctcagccagatgcaatcaatgccccagtcacctgctgttataacttcaccaataggaagatctcagtgcagaggctcgcgagctatagaagaatcaccagcagcaagtgtcccaaagaagctgtgatcttcaagaccattgtggccaaggagatctgtgctgaccccaagcagaagtgggttcaggattccatggaccacctggacaagcaaacccaaactccgaagacttga

SEQ ID NO: 397 - DNA, 1063 bp, Artificial Sequence
  Mouse IP-10 mRNA
catcccgagccaaccttccggaagcctccccatcagcaccatgaacccaagtgctgccgtcattttctgcctcatcctgctgggtctgagtgggactcaagggatccctctcgcaaggacggtccgctgcaactgcatccatatcgatgacgggccagtgagaatgagggccatagggaagcttgaaatcatccctgcgagcctatcctgcccacgtgttgagatcattgccacgatgaaaaagaatgatgagcagagatgtctgaatccggaatctaagaccatcaagaatttaatgaaagcgtttagccaaaaaaggtctaaaagggctccttaactggagtgaagccacgcacacaccccggtgctgcgatggatggacagcagagagcctctctccatcactcccctttacccagtggatggctagtcctaattgcccttggtcttctgaaaggtgaccagccgtggtcacatcagctgctactcctcctgcaggatgatggtcaagccatggtcctgagacaaaagtaactgccgaagcaagaattctttaagggctggtctgagtcctcgctcaagtggctgggatggctgtcctagctctgtactgtaagctatgtggaggtgcgacgcccttcaccatgtgccatgcccaggctgctccccacaccctccttgtcctccctagctcaggctcgtcagttctaagtttacctgagctcttttatttcagatgtaagactacaaatttaagtttgtaagcacgaacttaaccaccatcttcccaaggggttatcaagatactcagaggaacctgaaaatgtatgtgtaaatactatttaatgaacgactgtacaaagtagaattcctaatgtattttttgtatgctttgcattgtatatggaagaacttgtgtcatcaagtatgtatcaatgggtagttaaagtttatttttaaaaccgtccaataccttttgtattatgtaacattcaaaagacaatgtactgtattgaaagtagtaagagacccaaaatgtaataaagtaataataactgacatg

SEQ ID NO: 398 - DNA, 284 bp, Artificial Sequence
  DNA encoding mIP-10
atgaacccaagtgctgccgtcattttctgcctcatcctgctgggtctgagtgggactcaagggatccctctcgcaaggacggtccgctgcaactgcatccatatcgatgacgggccagtgagaatgagggccatagggaagcttgaaatcatccctgcgagcctatcctgcccacgtgttgagatcattgccacgatgaaaaagaatgatgagcagagatgtctgaatccggaatctaagaccatcaagaatttaatgaaagcgtttagccaaaaaaggtctaa

SEQ ID NO: 399 - DNA, 5834 bp, Artificial Sequence
  TK-SE-mIP10-1 transfer vector
agcgcccaatacgcaaaccgcctctccccgcgcgttggccgattcattaatgcagctggcacgacaggtttcccgactggaaagcgggcagtgagcgcaacgcaattaatgtgagttagctcactcattaggcaccccaggctttacactttatgcttccggctcgtatgttgtgtggaattgtgagcggataacaatttcacacaggaaacagctatgaccatgattacgccaagctttgttacagatggaagggtcaaacttaataaaggatatttgttcgactttgtgattagtttgatgcgattcaaaaaagaatcctctctagctaccaccgcaatagatcctgttagatacatagatcctcgtcgtgatatcgcattttctaacgtgatggatatattaaagtcgaataaagtgaacaataattaattctttattgtcatcatgaacggcggacatattcagttgataatcggccccatgttttcaggtaaaagtacagaattaattagacgagttagacgttatcaaatagctcaatataaatgcgtgactataaaatattctaacgataatagatacggaacgggactatggacgcatgataagaataattttgaagcattggaagcaactaaactatgtgatgtcttggaatcaattacagatttctccgtgataggtatcgatgaaggacagttctttccagacattgtttaattctgtgagcgtatggcaaacggtaccgagctcaaaaattgaaaaactagcgtctttttttgctcgaagtcgacgccaccatgaacccaagtgctgccgtcattttctgcctcatcctgctgggtctgagtgggactcaagggatccctctcgcaaggacggtccgctgcaactgcatccatatcgatgacgggccagtgagaatgagggccatagggaagcttgaaatcatccctgcgagcctatcctgcccacgtgttgagatcattgccacgatgaaaaagaatgatgagcagagatgtctgaatccggaatctaagaccatcaagaatttaatgaaagcgtttagccaaaaaaggtctaattaattaatttttatcgatctaattcaacaatgtctggagagctcggatccttctgtgagcgtatggcaaacgaaggaaaaatagttatagtagccgcactcgatgggacatttcaacgtaaaccgtttaataatattttgaatcttattccattatctgaaatggtggtaaaactaactgctgtgtgtatgaaatgctttaaggaggcttccttttctaaacgattgggtgaggaaaccgagatagagataataggaggtaatgatatgtatcaatcggtgtgtagaaagtgttacgtcggctcataatattatattttttatctaaaaaactaaaaataaacattgattaaattttaatataatacttaaaaatggatgttgtgtcgttagataaaccgtttatgtattttgaggaaattgataatgagttagattacgaaccagaaagtgcaaatgaggtcgcaaaaaaactgccgtatcaaggacagttaaaactattactaggagaattattttttcttagtaagttacagcgacacggtatattagatggtgccaccgtagtgtactagttaacggccgccagtgtgctggaattctagaaaagtagaaaatatattctaatttattgcacgggatgagcgaaaaatacatcgtcacctgggacatgttgcagatccatgcacgtaaactcgcaagccgactgatgccttctgaacaatggaaaggcattattgccgtaagccgtggcggtctggtaccgggtgcgttactggcgcgtgaactgggtattcgtcatgtcgataccgtttgtatttccagctacgatcacgacaaccagcgcgagcttaaagtgctgaaacgcgcagaaggcgatggcgaaggcttcatcgttattgatgacctggtggataccggtggtactgcggttgcgattcgtgaaatgtatccaaaagcgcactttgtcaccatcttcgcaaaaccggctggtcgtccgctggttgatgactatgttgttgatatcccgcaagatacctggattgaacagccgtgggatatgggcgtcgtattcgtcccgccaatctccggtcgctaaggatcagcttggcgtaatcaagccgaattctgcagatatccatcacactggcggccgctcgagcatgcatctagagggcccaattcgccctatagtgagtcgtattacaattcactggccgtcgttttacaacgtcgtgactgggaaaaccctggcgttacccaacttaatcgccttgcagcacatccccctttcgccagctggcgtaatagcgaagaggcccgcaccgatcgcccttcccaacagttgcgcagcctgaatggcgaatggacgcgccctgtagcggcgcattaagcgcggcgggtgtggtggttacgcgcagcgtgaccgctacacttgccagcgccctagcgcccgctcctttcgctttcttcccttcctttctcgccacgttcgccggctttccccgtcaagctctaaatcgggggctccctttagggttccgatttagtgctttacggcacctcgaccccaaaaaacttgattagggtgatggttcacgtagtgggccatcgccctgatagacggtttttcgccctttgacgttggagtccacgttctttaatagtggactcttgttccaaactggaacaacactcaaccctatctcggtctattcttttgatttataagggattttgccgatttcggcctattggttaaaaaatgagctgatttaacaaaaatttaacgcgaattttaacaaaattcagggcgcaagggctgctaaaggaagcggaacacgtagaaagccagtccgcagaaacggtgctgaccccggatgaatgtcagctactgggctatctggacaagggaaaacgcaagcgcaaagagaaagcaggtagcttgcagtgggcttacatggcgatagctagactgggcggttttatggacagcaagcgaaccggaattgccagctggggcgccctctggtaaggttgggaagccctgcaaagtaaactggatggctttcttgccgccaaggatctgatggcgcaggggatcaagatctgatcaagagacaggatgaggatcgtttcgcatgattgaacaagatggattgcacgcaggttctccggccgcttgggtggagaggctattcggctatgactgggcacaacagacaatcggctgctctgatgccgccgtgttccggctgtcagcgcaggggcgcccggttctttttgtcaagaccgacctgtccggtgccctgaatgaactgcaggacgaggcagcgcggctatcgtggctggccacgacgggcgttccttgcgcagctgtgctcgacgttgtcactgaagcgggaagggactggctgctattgggcgaagtgccggggcaggatctcctgtcatcccaccttgctcctgccgagaaagtatccatcatggctgatgcaatgcggcggctgcatacgcttgatccggctacctgcccattcgaccaccaagcgaaacatcgcatcgagcgagcacgtactcggatggaagccggtcttgtcgatcaggatgatctggacgaagagcatcaggggctcgcgccagccgaactgttcgccaggctcaaggcgcgcatgcccgacggcgaggatctcgtcgtgacccatggcgatgcctgcttgccgaatatcatggtggaaaatggccgcttttctggattcatcgactgtggccggctgggtgtggcggaccgctatcaggacatagcgttggctacccgtgatattgctgaagagcttggcggcgaatgggctgaccgcttcctcgtgctttacggtatcgccgctcccgattcgcagcgcatcgccttctatcgccttcttgacgagttcttctgaattgaaaaaggaagagtatgagtattcaacatttccgtgtcgcccttattcccttttttgcggcattttgccttcctgtttttgctcacccagaaacgctggtgaaagtaaaagatgctgaagatcagttgggtgcacgagtgggttacatcgaactggatctcaacagcggtaagatccttgagagttttcgccccgaagaacgttttccaatgatgagcacttttaaagttctgctatgtggcgcggtattatcccgtattgacgccgggcaagagcaactcggtcgccgcatacactattctcagaatgacttggttgagtactcaccagtcacagaaaagcatcttacggatggcatgacagtaagagaattatgcagtgctgccataaccatgagtgataacactgcggccaacttacttctgacaacgatcggaggaccgaaggagctaaccgcttttttgcacaacatgggggatcatgtaactcgccttgatcgttgggaaccggagctgaatgaagccataccaaacgacgagcgtgacaccacgatgcctgtagcaatggcaacaacgttgcgcaaactattaactggcgaactacttactctagcttcccggcaacaattaatagactggatggaggcggataaagttgcaggaccacttctgcgctcggcccttccggctggctggtttattgctgataaatctggagccggtgagcgtgggtctcgcggtatcattgcagcactggggccagatggtaagccctcccgtatcgtagttatctacacgacggggagtcaggcaactatggatgaacgaaatagacagatcgctgagataggtgcctcactgattaagcattggtaactgtcagaccaagtttactcatatatactttagattgatttaaaacttcatttttaatttaaaaggatctaggtgaagatcctttttgataatctcatgaccaaaatcccttaacgtgagttttcgttccactgagcgtcagaccccgtagaaaagatcaaaggatcttcttgagatcctttttttctgcgcgtaatctgctgcttgcaaacaaaaaaaccaccgctaccagcggtggtttgtttgccggatcaagagctaccaactctttttccgaaggtaactggcttcagcagagcgcagataccaaatactgttcttctagtgtagccgtagttaggccaccacttcaagaactctgtagcaccgcctacatacctcgctctgctaatcctgttaccagtggctgctgccagtggcgataagtcgtgtcttaccgggttggactcaagacgatagttaccggataaggcgcagcggtcgggctgaacggggggttcgtgcacacagcccagcttggagcgaacgacctacaccgaactgagatacctacagcgtgagctatgagaaagcgccacgcttcccgaagggagaaaggcggacaggtatccggtaagcggcagggtcggaacaggagagcgcacgagggagcttccagggggaaacgcctggtatctttatagtcctgtcgggtttcgccacctctgacttgagcgtcgatttttgtgatgctcgtcaggggggcggagcctatggaaaaacgccagcaacgcggcctttttacggttcctggccttttgctggccttttgctcacatgttctttcctgcgttatcccctgattctgtggataaccgtattaccgcctttgagtgagctgataccgctcgccgcagccgaacgttgtttaattctgtgagcgtatggcaaacg

SEQ ID NO: 400 - DNA, 5832 bp, Artificial Sequence
  TK-SL-mIP10-1 transfer vector
agcgcccaatacgcaaaccgcctctccccgcgcgttggccgattcattaatgcagctggcacgacaggtttcccgactggaaagcgggcagtgagcgcaacgcaattaatgtgagttagctcactcattaggcaccccaggctttacactttatgcttccggctcgtatgttgtgtggaattgtgagcggataacaatttcacacaggaaacagctatgaccatgattacgccaagctttgttacagatggaagggtcaaacttaataaaggatatttgttcgactttgtgattagtttgatgcgattcaaaaaagaatcctctctagctaccaccgcaatagatcctgttagatacatagatcctcgtcgtgatatcgcattttctaacgtgatggatatattaaagtcgaataaagtgaacaataattaattctttattgtcatcatgaacggcggacatattcagttgataatcggccccatgttttcaggtaaaagtacagaattaattagacgagttagacgttatcaaatagctcaatataaatgcgtgactataaaatattctaacgataatagatacggaacgggactatggacgcatgataagaataattttgaagcattggaagcaactaaactatgtgatgtcttggaatcaattacagatttctccgtgataggtatcgatgaaggacagttctttccagacattgtttaattctgtgagcgtatggcaaacggtaccgagctcttttttttttttttttttttggcatataaataagtcgacgccaccatgaacccaagtgctgccgtcattttctgcctcatcctgctgggtctgagtgggactcaagggatccctctcgcaaggacggtccgctgcaactgcatccatatcgatgacgggccagtgagaatgagggccatagggaagcttgaaatcatccctgcgagcctatcctgcccacgtgttgagatcattgccacgatgaaaaagaatgatgagcagagatgtctgaatccggaatctaagaccatcaagaatttaatgaaagcgtttagccaaaaaaggtctaattaattaatttttatcgatctaattcaacaatgtctggagagctcggatccttctgtgagcgtatggcaaacgaaggaaaaatagttatagtagccgcactcgatgggacatttcaacgtaaaccgtttaataatattttgaatcttattccattatctgaaatggtggtaaaactaactgctgtgtgtatgaaatgctttaaggaggcttccttttctaaacgattgggtgaggaaaccgagatagagataataggaggtaatgatatgtatcaatcggtgtgtagaaagtgttacgtcggctcataatattatattttttatctaaaaaactaaaaataaacattgattaaattttaatataatacttaaaaatggatgttgtgtcgttagataaaccgtttatgtattttgaggaaattgataatgagttagattacgaaccagaaagtgcaaatgaggtcgcaaaaaaactgccgtatcaaggacagttaaaactattactaggagaattattttttcttagtaagttacagcgacacggtatattagatggtgccaccgtagtgtactagttaacggccgccagtgtgctggaattctagaaaagtagaaaatatattctaatttattgcacgggatgagcgaaaaatacatcgtcacctgggacatgttgcagatccatgcacgtaaactcgcaagccgactgatgccttctgaacaatggaaaggcattattgccgtaagccgtggcggtctggtaccgggtgcgttactggcgcgtgaactgggtattcgtcatgtcgataccgtttgtatttccagctacgatcacgacaaccagcgcgagcttaaagtgctgaaacgcgcagaaggcgatggcgaaggcttcatcgttattgatgacctggtggataccggtggtactgcggttgcgattcgtgaaatgtatccaaaagcgcactttgtcaccatcttcgcaaaaccggctggtcgtccgctggttgatgactatgttgttgatatcccgcaagatacctggattgaacagccgtgggatatgggcgtcgtattcgtcccgccaatctccggtcgctaaggatcagcttggcgtaatcaagccgaattctgcagatatccatcacactggcggccgctcgagcatgcatctagagggcccaattcgccctatagtgagtcgtattacaattcactggccgtcgttttacaacgtcgtgactgggaaaaccctggcgttacccaacttaatcgccttgcagcacatccccctttcgccagctggcgtaatagcgaagaggcccgcaccgatcgcccttcccaacagttgcgcagcctgaatggcgaatggacgcgccctgtagcggcgcattaagcgcggcgggtgtggtggttacgcgcagcgtgaccgctacacttgccagcgccctagcgcccgctcctttcgctttcttcccttcctttctcgccacgttcgccggctttccccgtcaagctctaaatcgggggctccctttagggttccgatttagtgctttacggcacctcgaccccaaaaaacttgattagggtgatggttcacgtagtgggccatcgccctgatagacggtttttcgccctttgacgttggagtccacgttctttaatagtggactcttgttccaaactggaacaacactcaaccctatctcggtctattcttttgatttataagggattttgccgatttcggcctattggttaaaaaatgagctgatttaacaaaaatttaacgcgaattttaacaaaattcagggcgcaagggctgctaaaggaagcggaacacgtagaaagccagtccgcagaaacggtgctgaccccggatgaatgtcagctactgggctatctggacaagggaaaacgcaagcgcaaagagaaagcaggtagcttgcagtgggcttacatggcgatagctagactgggcggttttatggacagcaagcgaaccggaattgccagctggggcgccctctggtaaggttgggaagccctgcaaagtaaactggatggctttcttgccgccaaggatctgatggcgcaggggatcaagatctgatcaagagacaggatgaggatcgtttcgcatgattgaacaagatggattgcacgcaggttctccggccgcttgggtggagaggctattcggctatgactgggcacaacagacaatcggctgctctgatgccgccgtgttccggctgtcagcgcaggggcgcccggttctttttgtcaagaccgacctgtccggtgccctgaatgaactgcaggacgaggcagcgcggctatcgtggctggccacgacgggcgttccttgcgcagctgtgctcgacgttgtcactgaagcgggaagggactggctgctattgggcgaagtgccggggcaggatctcctgtcatcccaccttgctcctgccgagaaagtatccatcatggctgatgcaatgcggcggctgcatacgcttgatccggctacctgcccattcgaccaccaagcgaaacatcgcatcgagcgagcacgtactcggatggaagccggtcttgtcgatcaggatgatctggacgaagagcatcaggggctcgcgccagccgaactgttcgccaggctcaaggcgcgcatgcccgacggcgaggatctcgtcgtgacccatggcgatgcctgcttgccgaatatcatggtggaaaatggccgcttttctggattcatcgactgtggccggctgggtgtggcggaccgctatcaggacatagcgttggctacccgtgatattgctgaagagcttggcggcgaatgggctgaccgcttcctcgtgctttacggtatcgccgctcccgattcgcagcgcatcgccttctatcgccttcttgacgagttcttctgaattgaaaaaggaagagtatgagtattcaacatttccgtgtcgcccttattcccttttttgcggcattttgccttcctgtttttgctcacccagaaacgctggtgaaagtaaaagatgctgaagatcagttgggtgcacgagtgggttacatcgaactggatctcaacagcggtaagatccttgagagttttcgccccgaagaacgttttccaatgatgagcacttttaaagttctgctatgtggcgcggtattatcccgtattgacgccgggcaagagcaactcggtcgccgcatacactattctcagaatgacttggttgagtactcaccagtcacagaaaagcatcttacggatggcatgacagtaagagaattatgcagtgctgccataaccatgagtgataacactgcggccaacttacttctgacaacgatcggaggaccgaaggagctaaccgcttttttgcacaacatgggggatcatgtaactcgccttgatcgttgggaaccggagctgaatgaagccataccaaacgacgagcgtgacaccacgatgcctgtagcaatggcaacaacgttgcgcaaactattaactggcgaactacttactctagcttcccggcaacaattaatagactggatggaggcggataaagttgcaggaccacttctgcgctcggcccttccggctggctggtttattgctgataaatctggagccggtgagcgtgggtctcgcggtatcattgcagcactggggccagatggtaagccctcccgtatcgtagttatctacacgacggggagtcaggcaactatggatgaacgaaatagacagatcgctgagataggtgcctcactgattaagcattggtaactgtcagaccaagtttactcatatatactttagattgatttaaaacttcatttttaatttaaaaggatctaggtgaagatcctttttgataatctcatgaccaaaatcccttaacgtgagttttcgttccactgagcgtcagaccccgtagaaaagatcaaaggatcttcttgagatcctttttttctgcgcgtaatctgctgcttgcaaacaaaaaaaccaccgctaccagcggtggtttgtttgccggatcaagagctaccaactctttttccgaaggtaactggcttcagcagagcgcagataccaaatactgttcttctagtgtagccgtagttaggccaccacttcaagaactctgtagcaccgcctacatacctcgctctgctaatcctgttaccagtggctgctgccagtggcgataagtcgtgtcttaccgggttggactcaagacgatagttaccggataaggcgcagcggtcgggctgaacggggggttcgtgcacacagcccagcttggagcgaacgacctacaccgaactgagatacctacagcgtgagctatgagaaagcgccacgcttcccgaagggagaaaggcggacaggtatccggtaagcggcagggtcggaacaggagagcgcacgagggagcttccagggggaaacgcctggtatctttatagtcctgtcgggtttcgccacctctgacttgagcgtcgatttttgtgatgctcgtcaggggggcggagcctatggaaaaacgccagcaacgcggcctttttacggttcctggccttttgctggccttttgctcacatgttctttcctgcgttatcccctgattctgtggataaccgtattaccgcctttgagtgagctgataccgctcgccgcagccgaacgttgtttaattctgtgagcgtatggcaaacg

SEQ ID NO: 401 - DNA, 5869 bp, Artificial Sequence
  TK-SEL-mIP10-1 transfer vector
agcgcccaatacgcaaaccgcctctccccgcgcgttggccgattcattaatgcagctggcacgacaggtttcccgactggaaagcgggcagtgagcgcaacgcaattaatgtgagttagctcactcattaggcaccccaggctttacactttatgcttccggctcgtatgttgtgtggaattgtgagcggataacaatttcacacaggaaacagctatgaccatgattacgccaagctttgttacagatggaagggtcaaacttaataaaggatatttgttcgactttgtgattagtttgatgcgattcaaaaaagaatcctctctagctaccaccgcaatagatcctgttagatacatagatcctcgtcgtgatatcgcattttctaacgtgatggatatattaaagtcgaataaagtgaacaataattaattctttattgtcatcatgaacggcggacatattcagttgataatcggccccatgttttcaggtaaaagtacagaattaattagacgagttagacgttatcaaatagctcaatataaatgcgtgactataaaatattctaacgataatagatacggaacgggactatggacgcatgataagaataattttgaagcattggaagcaactaaactatgtgatgtcttggaatcaattacagatttctccgtgataggtatcgatgaaggacagttctttccagacattgtttaattctgtgagcgtatggcaaacggtaccgagctcggtttggaattagtgaaagcttaaaaattgaaattttattttttttttttggaatataaataagctcgaagtcgacgccaccatgaacccaagtgctgccgtcattttctgcctcatcctgctgggtctgagtgggactcaagggatccctctcgcaaggacggtccgctgcaactgcatccatatcgatgacgggccagtgagaatgagggccatagggaagcttgaaatcatccctgcgagcctatcctgcccacgtgttgagatcattgccacgatgaaaaagaatgatgagcagagatgtctgaatccggaatctaagaccatcaagaatttaatgaaagcgtttagccaaaaaaggtctaattaattaatttttatcgatctaattcaacaatgtctggagagctcggatccttctgtgagcgtatggcaaacgaaggaaaaatagttatagtagccgcactcgatgggacatttcaacgtaaaccgtttaataatattttgaatcttattccattatctgaaatggtggtaaaactaactgctgtgtgtatgaaatgctttaaggaggcttccttttctaaacgattgggtgaggaaaccgagatagagataataggaggtaatgatatgtatcaatcggtgtgtagaaagtgttacgtcggctcataatattatattttttatctaaaaaactaaaaataaacattgattaaattttaatataatacttaaaaatggatgttgtgtcgttagataaaccgtttatgtattttgaggaaattgataatgagttagattacgaaccagaaagtgcaaatgaggtcgcaaaaaaactgccgtatcaaggacagttaaaactattactaggagaattattttttcttagtaagttacagcgacacggtatattagatggtgccaccgtagtgtactagttaacggccgccagtgtgctggaattctagaaaagtagaaaatatattctaatttattgcacgggatgagcgaaaaatacatcgtcacctgggacatgttgcagatccatgcacgtaaactcgcaagccgactgatgccttctgaacaatggaaaggcattattgccgtaagccgtggcggtctggtaccgggtgcgttactggcgcgtgaactgggtattcgtcatgtcgataccgtttgtatttccagctacgatcacgacaaccagcgcgagcttaaagtgctgaaacgcgcagaaggcgatggcgaaggcttcatcgttattgatgacctggtggataccggtggtactgcggttgcgattcgtgaaatgtatccaaaagcgcactttgtcaccatcttcgcaaaaccggctggtcgtccgctggttgatgactatgttgttgatatcccgcaagatacctggattgaacagccgtgggatatgggcgtcgtattcgtcccgccaatctccggtcgctaaggatcagcttggcgtaatcaagccgaattctgcagatatccatcacactggcggccgctcgagcatgcatctagagggcccaattcgccctatagtgagtcgtattacaattcactggccgtcgttttacaacgtcgtgactgggaaaaccctggcgttacccaacttaatcgccttgcagcacatccccctttcgccagctggcgtaatagcgaagaggcccgcaccgatcgcccttcccaacagttgcgcagcctgaatggcgaatggacgcgccctgtagcggcgcattaagcgcggcgggtgtggtggttacgcgcagcgtgaccgctacacttgccagcgccctagcgcccgctcctttcgctttcttcccttcctttctcgccacgttcgccggctttccccgtcaagctctaaatcgggggctccctttagggttccgatttagtgctttacggcacctcgaccccaaaaaacttgattagggtgatggttcacgtagtgggccatcgccctgatagacggtttttcgccctttgacgttggagtccacgttctttaatagtggactcttgttccaaactggaacaacactcaaccctatctcggtctattcttttgatttataagggattttgccgatttcggcctattggttaaaaaatgagctgatttaacaaaaatttaacgcgaattttaacaaaattcagggcgcaagggctgctaaaggaagcggaacacgtagaaagccagtccgcagaaacggtgctgaccccggatgaatgtcagctactgggctatctggacaagggaaaacgcaagcgcaaagagaaagcaggtagcttgcagtgggcttacatggcgatagctagactgggcggttttatggacagcaagcgaaccggaattgccagctggggcgccctctggtaaggttgggaagccctgcaaagtaaactggatggctttcttgccgccaaggatctgatggcgcaggggatcaagatctgatcaagagacaggatgaggatcgtttcgcatgattgaacaagatggattgcacgcaggttctccggccgcttgggtggagaggctattcggctatgactgggcacaacagacaatcggctgctctgatgccgccgtgttccggctgtcagcgcaggggcgcccggttctttttgtcaagaccgacctgtccggtgccctgaatgaactgcaggacgaggcagcgcggctatcgtggctggccacgacgggcgttccttgcgcagctgtgctcgacgttgtcactgaagcgggaagggactggctgctattgggcgaagtgccggggcaggatctcctgtcatcccaccttgctcctgccgagaaagtatccatcatggctgatgcaatgcggcggctgcatacgcttgatccggctacctgcccattcgaccaccaagcgaaacatcgcatcgagcgagcacgtactcggatggaagccggtcttgtcgatcaggatgatctggacgaagagcatcaggggctcgcgccagccgaactgttcgccaggctcaaggcgcgcatgcccgacggcgaggatctcgtcgtgacccatggcgatgcctgcttgccgaatatcatggtggaaaatggccgcttttctggattcatcgactgtggccggctgggtgtggcggaccgctatcaggacatagcgttggctacccgtgatattgctgaagagcttggcggcgaatgggctgaccgcttcctcgtgctttacggtatcgccgctcccgattcgcagcgcatcgccttctatcgccttcttgacgagttcttctgaattgaaaaaggaagagtatgagtattcaacatttccgtgtcgcccttattcccttttttgcggcattttgccttcctgtttttgctcacccagaaacgctggtgaaagtaaaagatgctgaagatcagttgggtgcacgagtgggttacatcgaactggatctcaacagcggtaagatccttgagagttttcgccccgaagaacgttttccaatgatgagcacttttaaagttctgctatgtggcgcggtattatcccgtattgacgccgggcaagagcaactcggtcgccgcatacactattctcagaatgacttggttgagtactcaccagtcacagaaaagcatcttacggatggcatgacagtaagagaattatgcagtgctgccataaccatgagtgataacactgcggccaacttacttctgacaacgatcggaggaccgaaggagctaaccgcttttttgcacaacatgggggatcatgtaactcgccttgatcgttgggaaccggagctgaatgaagccataccaaacgacgagcgtgacaccacgatgcctgtagcaatggcaacaacgttgcgcaaactattaactggcgaactacttactctagcttcccggcaacaattaatagactggatggaggcggataaagttgcaggaccacttctgcgctcggcccttccggctggctggtttattgctgataaatctggagccggtgagcgtgggtctcgcggtatcattgcagcactggggccagatggtaagccctcccgtatcgtagttatctacacgacggggagtcaggcaactatggatgaacgaaatagacagatcgctgagataggtgcctcactgattaagcattggtaactgtcagaccaagtttactcatatatactttagattgatttaaaacttcatttttaatttaaaaggatctaggtgaagatcctttttgataatctcatgaccaaaatcccttaacgtgagttttcgttccactgagcgtcagaccccgtagaaaagatcaaaggatcttcttgagatcctttttttctgcgcgtaatctgctgcttgcaaacaaaaaaaccaccgctaccagcggtggtttgtttgccggatcaagagctaccaactctttttccgaaggtaactggcttcagcagagcgcagataccaaatactgttcttctagtgtagccgtagttaggccaccacttcaagaactctgtagcaccgcctacatacctcgctctgctaatcctgttaccagtggctgctgccagtggcgataagtcgtgtcttaccgggttggactcaagacgatagttaccggataaggcgcagcggtcgggctgaacggggggttcgtgcacacagcccagcttggagcgaacgacctacaccgaactgagatacctacagcgtgagctatgagaaagcgccacgcttcccgaagggagaaaggcggacaggtatccggtaagcggcagggtcggaacaggagagcgcacgagggagcttccagggggaaacgcctggtatctttatagtcctgtcgggtttcgccacctctgacttgagcgtcgatttttgtgatgctcgtcaggggggcggagcctatggaaaaacgccagcaacgcggcctttttacggttcctggccttttgctggccttttgctcacatgttctttcctgcgttatcccctgattctgtggataaccgtattaccgcctttgagtgagctgataccgctcgccgcagccgaacgttgtttaattctgtgagcgtatggcaaacg

SEQ ID NO: 402 - DNA, 32 bp, Artificial Sequence
  mIP10-5 primer
gtcgacgccaccatgaacccaagtgctgccgt

SEQ ID NO: 403 - DNA, 36 bp, Artificial Sequence
  mIP10-3  primer
ttaattaattaaggagcccttttagaccttttttgg

SEQ ID NO: 404 - DNA, 5990 bp, Artificial Sequence
  TK-SE-CSF-2 vector
agcgcccaatacgcaaaccgcctctccccgcgcgttggccgattcattaatgcagctggcacgacaggtttcccgactggaaagcgggcagtgagcgcaacgcaattaatgtgagttagctcactcattaggcaccccaggctttacactttatgcttccggctcgtatgttgtgtggaattgtgagcggataacaatttcacacaggaaacagctatgaccatgattacgccaagctttgttacagatggaagggtcaaacttaataaaggatatttgttcgactttgtgattagtttgatgcgattcaaaaaagaatcctctctagctaccaccgcaatagatcctgttagatacatagatcctcgtcgtgatatcgcattttctaacgtgatggatatattaaagtcgaataaagtgaacaataattaattctttattgtcatcatgaacggcggacatattcagttgataatcggccccatgttttcaggtaaaagtacagaattaattagacgagttagacgttatcaaatagctcaatataaatgcgtgactataaaatattctaacgataatagatacggaacgggactatggacgcatgataagaataattttgaagcattggaagcaactaaactatgtgatgtcttggaatcaattacagatttctccgtgataggtatcgatgaaggacagttctttccagacattgtttaattctgtgagcgtatggcaaacggtaccgagctcaaaaattgaaaaactagcgtctttttttgctcgaagtcgacatgtggctgcagaatttacttttcctgggcattgtggtctacagcctctcagcacccacccgctcacccatcactgtcacccggccttggaagcatgtagaggccatcaaagaagccctgaacctcctggatgacatgcctgtcacattgaatgaagaggtagaagtcgtctctaacgagttctccttcaagaagctaacatgtgtgcagacccgcctgaagatattcgagcagggtctacggggcaatttcaccaaactcaagggcgccttgaacatgacagccagctactaccagacatactgccccccaactccggaaacggactgtgaaacacaagttaccacctatgcggatttcatagacagccttaaaacctttctgactgatatcccctttgaatgcaaaaaaccagtccaaaaatgacccaagggcgaattgggtaattaattaatttttatcgatctaattcaacaatgtctggagagctcggatccttctgtgagcgtatggcaaacgaaggaaaaatagttatagtagccgcactcgatgggacatttcaacgtaaaccgtttaataatattttgaatcttattccattatctgaaatggtggtaaaactaactgctgtgtgtatgaaatgctttaaggaggcttccttttctaaacgattgggtgaggaaaccgagatagagataataggaggtaatgatatgtatcaatcggtgtgtagaaagtgttacgtcggctcataatattatattttttatctaaaaaactaaaaataaacattgattaaattttaatataatacttaaaaatggatgttgtgtcgttagataaaccgtttatgtattttgaggaaattgataatgagttagattacgaaccagaaagtgcaaatgaggtcgcaaaaaaactgccgtatcaaggacagttaaaactattactaggagaattattttttcttagtaagttacagcgacacggtatattagatggtgccaccgtagtgtactagttaacggccgccagtgtgctggaattctagaaaagtagaaaatatattctaatttattgcacgggatgagcgaaaaatacatcgtcacctgggacatgttgcagatccatgcacgtaaactcgcaagccgactgatgccttctgaacaatggaaaggcattattgccgtaagccgtggcggtctggtaccgggtgcgttactggcgcgtgaactgggtattcgtcatgtcgataccgtttgtatttccagctacgatcacgacaaccagcgcgagcttaaagtgctgaaacgcgcagaaggcgatggcgaaggcttcatcgttattgatgacctggtggataccggtggtactgcggttgcgattcgtgaaatgtatccaaaagcgcactttgtcaccatcttcgcaaaaccggctggtcgtccgctggttgatgactatgttgttgatatcccgcaagatacctggattgaacagccgtgggatatgggcgtcgtattcgtcccgccaatctccggtcgctaaggatcagcttggcgtaatcaagccgaattctgcagatatccatcacactggcggccgctcgagcatgcatctagagggcccaattcgccctatagtgagtcgtattacaattcactggccgtcgttttacaacgtcgtgactgggaaaaccctggcgttacccaacttaatcgccttgcagcacatccccctttcgccagctggcgtaatagcgaagaggcccgcaccgatcgcccttcccaacagttgcgcagcctgaatggcgaatggacgcgccctgtagcggcgcattaagcgcggcgggtgtggtggttacgcgcagcgtgaccgctacacttgccagcgccctagcgcccgctcctttcgctttcttcccttcctttctcgccacgttcgccggctttccccgtcaagctctaaatcgggggctccctttagggttccgatttagtgctttacggcacctcgaccccaaaaaacttgattagggtgatggttcacgtagtgggccatcgccctgatagacggtttttcgccctttgacgttggagtccacgttctttaatagtggactcttgttccaaactggaacaacactcaaccctatctcggtctattcttttgatttataagggattttgccgatttcggcctattggttaaaaaatgagctgatttaacaaaaatttaacgcgaattttaacaaaattcagggcgcaagggctgctaaaggaagcggaacacgtagaaagccagtccgcagaaacggtgctgaccccggatgaatgtcagctactgggctatctggacaagggaaaacgcaagcgcaaagagaaagcaggtagcttgcagtgggcttacatggcgatagctagactgggcggttttatggacagcaagcgaaccggaattgccagctggggcgccctctggtaaggttgggaagccctgcaaagtaaactggatggctttcttgccgccaaggatctgatggcgcaggggatcaagatctgatcaagagacaggatgaggatcgtttcgcatgattgaacaagatggattgcacgcaggttctccggccgcttgggtggagaggctattcggctatgactgggcacaacagacaatcggctgctctgatgccgccgtgttccggctgtcagcgcaggggcgcccggttctttttgtcaagaccgacctgtccggtgccctgaatgaactgcaggacgaggcagcgcggctatcgtggctggccacgacgggcgttccttgcgcagctgtgctcgacgttgtcactgaagcgggaagggactggctgctattgggcgaagtgccggggcaggatctcctgtcatcccaccttgctcctgccgagaaagtatccatcatggctgatgcaatgcggcggctgcatacgcttgatccggctacctgcccattcgaccaccaagcgaaacatcgcatcgagcgagcacgtactcggatggaagccggtcttgtcgatcaggatgatctggacgaagagcatcaggggctcgcgccagccgaactgttcgccaggctcaaggcgcgcatgcccgacggcgaggatctcgtcgtgacccatggcgatgcctgcttgccgaatatcatggtggaaaatggccgcttttctggattcatcgactgtggccggctgggtgtggcggaccgctatcaggacatagcgttggctacccgtgatattgctgaagagcttggcggcgaatgggctgaccgcttcctcgtgctttacggtatcgccgctcccgattcgcagcgcatcgccttctatcgccttcttgacgagttcttctgaattgaaaaaggaagagtatgagtattcaacatttccgtgtcgcccttattcccttttttgcggcattttgccttcctgtttttgctcacccagaaacgctggtgaaagtaaaagatgctgaagatcagttgggtgcacgagtgggttacatcgaactggatctcaacagcggtaagatccttgagagttttcgccccgaagaacgttttccaatgatgagcacttttaaagttctgctatgtggcgcggtattatcccgtattgacgccgggcaagagcaactcggtcgccgcatacactattctcagaatgacttggttgagtactcaccagtcacagaaaagcatcttacggatggcatgacagtaagagaattatgcagtgctgccataaccatgagtgataacactgcggccaacttacttctgacaacgatcggaggaccgaaggagctaaccgcttttttgcacaacatgggggatcatgtaactcgccttgatcgttgggaaccggagctgaatgaagccataccaaacgacgagcgtgacaccacgatgcctgtagcaatggcaacaacgttgcgcaaactattaactggcgaactacttactctagcttcccggcaacaattaatagactggatggaggcggataaagttgcaggaccacttctgcgctcggcccttccggctggctggtttattgctgataaatctggagccggtgagcgtgggtctcgcggtatcattgcagcactggggccagatggtaagccctcccgtatcgtagttatctacacgacggggagtcaggcaactatggatgaacgaaatagacagatcgctgagataggtgcctcactgattaagcattggtaactgtcagaccaagtttactcatatatactttagattgatttaaaacttcatttttaatttaaaaggatctaggtgaagatcctttttgataatctcatgaccaaaatcccttaacgtgagttttcgttccactgagcgtcagaccccgtagaaaagatcaaaggatcttcttgagatcctttttttctgcgcgtaatctgctgcttgcaaacaaaaaaaccaccgctaccagcggtggtttgtttgccggatcaagagctaccaactctttttccgaaggtaactggcttcagcagagcgcagataccaaatactgttcttctagtgtagccgtagttaggccaccacttcaagaactctgtagcaccgcctacatacctcgctctgctaatcctgttaccagtggctgctgccagtggcgataagtcgtgtcttaccgggttggactcaagacgatagttaccggataaggcgcagcggtcgggctgaacggggggttcgtgcacacagcccagcttggagcgaacgacctacaccgaactgagatacctacagcgtgagctatgagaaagcgccacgcttcccgaagggagaaaggcggacaggtatccggtaagcggcagggtcggaacaggagagcgcacgagggagcttccagggggaaacgcctggtatctttatagtcctgtcgggtttcgccacctctgacttgagcgtcgatttttgtgatgctcgtcaggggggcggagcctatggaaaaacgccagcaacgcggcctttttacggttcctggccttttgctggccttttgctcacatgttctttcctgcgttatcccctgattctgtggataaccgtattaccgcctttgagtgagctgataccgctcgccgcagccgaacgttgtttaattctgtgagcgtatggcaaacg

SEQ ID NO: 405 - DNA, 6027 bp, Artificial Sequence
  TK-SEL-CSF-2 vector
agcgcccaatacgcaaaccgcctctccccgcgcgttggccgattcattaatgcagctggcacgacaggtttcccgactggaaagcgggcagtgagcgcaacgcaattaatgtgagttagctcactcattaggcaccccaggctttacactttatgcttccggctcgtatgttgtgtggaattgtgagcggataacaatttcacacaggaaacagctatgaccatgattacgccaagctttgttacagatggaagggtcaaacttaataaaggatatttgttcgactttgtgattagtttgatgcgattcaaaaaagaatcctctctagctaccaccgcaatagatcctgttagatacatagatcctcgtcgtgatatcgcattttctaacgtgatggatatattaaagtcgaataaagtgaacaataattaattctttattgtcatcatgaacggcggacatattcagttgataatcggccccatgttttcaggtaaaagtacagaattaattagacgagttagacgttatcaaatagctcaatataaatgcgtgactataaaatattctaacgataatagatacggaacgggactatggacgcatgataagaataattttgaagcattggaagcaactaaactatgtgatgtcttggaatcaattacagatttctccgtgataggtatcgatgaaggacagttctttccagacattgtttaattctgtgagcgtatggcaaacggtaccgagctcggtttggaattagtgaaagcttaaaaattgaaattttattttttttttttggaatataaaataagctcgaaagtcgacatgtggctgcagaatttacttttcctgggcattgtggtctacagcctctcagcacccacccgctcacccatcactgtcacccggccttggaagcatgtagaggccatcaaagaagccctgaacctcctggatgacatgcctgtcacattgaatgaagaggtagaagtcgtctctaacgagttctccttcaagaagctaacatgtgtgcagacccgcctgaagatattcgagcagggtctacggggcaatttcaccaaactcaagggcgccttgaacatgacagccagctactaccagacatactgccccccaactccggaaacggactgtgaaacacaagttaccacctatgcggatttcatagacagccttaaaacctttctgactgatatcccctttgaatgcaaaaaaccagtccaaaaatgacccaagggcgaattgggtaattaattaatttttatcgatctaattcaacaatgtctggagagctcggatccttctgtgagcgtatggcaaacgaaggaaaaatagttatagtagccgcactcgatgggacatttcaacgtaaaccgtttaataatattttgaatcttattccattatctgaaatggtggtaaaactaactgctgtgtgtatgaaatgctttaaggaggcttccttttctaaacgattgggtgaggaaaccgagatagagataataggaggtaatgatatgtatcaatcggtgtgtagaaagtgttacgtcggctcataatattatattttttatctaaaaaactaaaaataaacattgattaaattttaatataatacttaaaaatggatgttgtgtcgttagataaaccgtttatgtattttgaggaaattgataatgagttagattacgaaccagaaagtgcaaatgaggtcgcaaaaaaactgccgtatcaaggacagttaaaactattactaggagaattattttttcttagtaagttacagcgacacggtatattagatggtgccaccgtagtgtactagttaacggccgccagtgtgctggaattctagaaaagtagaaaatatattctaatttattgcacgggatgagcgaaaaatacatcgtcacctgggacatgttgcagatccatgcacgtaaactcgcaagccgactgatgccttctgaacaatggaaaggcattattgccgtaagccgtggcggtctggtaccgggtgcgttactggcgcgtgaactgggtattcgtcatgtcgataccgtttgtatttccagctacgatcacgacaaccagcgcgagcttaaagtgctgaaacgcgcagaaggcgatggcgaaggcttcatcgttattgatgacctggtggataccggtggtactgcggttgcgattcgtgaaatgtatccaaaagcgcactttgtcaccatcttcgcaaaaccggctggtcgtccgctggttgatgactatgttgttgatatcccgcaagatacctggattgaacagccgtgggatatgggcgtcgtattcgtcccgccaatctccggtcgctaaggatcagcttggcgtaatcaagccgaattctgcagatatccatcacactggcggccgctcgagcatgcatctagagggcccaattcgccctatagtgagtcgtattacaattcactggccgtcgttttacaacgtcgtgactgggaaaaccctggcgttacccaacttaatcgccttgcagcacatccccctttcgccagctggcgtaatagcgaagaggcccgcaccgatcgcccttcccaacagttgcgcagcctgaatggcgaatggacgcgccctgtagcggcgcattaagcgcggcgggtgtggtggttacgcgcagcgtgaccgctacacttgccagcgccctagcgcccgctcctttcgctttcttcccttcctttctcgccacgttcgccggctttccccgtcaagctctaaatcgggggctccctttagggttccgatttagtgctttacggcacctcgaccccaaaaaacttgattagggtgatggttcacgtagtgggccatcgccctgatagacggtttttcgccctttgacgttggagtccacgttctttaatagtggactcttgttccaaactggaacaacactcaaccctatctcggtctattcttttgatttataagggattttgccgatttcggcctattggttaaaaaatgagctgatttaacaaaaatttaacgcgaattttaacaaaattcagggcgcaagggctgctaaaggaagcggaacacgtagaaagccagtccgcagaaacggtgctgaccccggatgaatgtcagctactgggctatctggacaagggaaaacgcaagcgcaaagagaaagcaggtagcttgcagtgggcttacatggcgatagctagactgggcggttttatggacagcaagcgaaccggaattgccagctggggcgccctctggtaaggttgggaagccctgcaaagtaaactggatggctttcttgccgccaaggatctgatggcgcaggggatcaagatctgatcaagagacaggatgaggatcgtttcgcatgattgaacaagatggattgcacgcaggttctccggccgcttgggtggagaggctattcggctatgactgggcacaacagacaatcggctgctctgatgccgccgtgttccggctgtcagcgcaggggcgcccggttctttttgtcaagaccgacctgtccggtgccctgaatgaactgcaggacgaggcagcgcggctatcgtggctggccacgacgggcgttccttgcgcagctgtgctcgacgttgtcactgaagcgggaagggactggctgctattgggcgaagtgccggggcaggatctcctgtcatcccaccttgctcctgccgagaaagtatccatcatggctgatgcaatgcggcggctgcatacgcttgatccggctacctgcccattcgaccaccaagcgaaacatcgcatcgagcgagcacgtactcggatggaagccggtcttgtcgatcaggatgatctggacgaagagcatcaggggctcgcgccagccgaactgttcgccaggctcaaggcgcgcatgcccgacggcgaggatctcgtcgtgacccatggcgatgcctgcttgccgaatatcatggtggaaaatggccgcttttctggattcatcgactgtggccggctgggtgtggcggaccgctatcaggacatagcgttggctacccgtgatattgctgaagagcttggcggcgaatgggctgaccgcttcctcgtgctttacggtatcgccgctcccgattcgcagcgcatcgccttctatcgccttcttgacgagttcttctgaattgaaaaaggaagagtatgagtattcaacatttccgtgtcgcccttattcccttttttgcggcattttgccttcctgtttttgctcacccagaaacgctggtgaaagtaaaagatgctgaagatcagttgggtgcacgagtgggttacatcgaactggatctcaacagcggtaagatccttgagagttttcgccccgaagaacgttttccaatgatgagcacttttaaagttctgctatgtggcgcggtattatcccgtattgacgccgggcaagagcaactcggtcgccgcatacactattctcagaatgacttggttgagtactcaccagtcacagaaaagcatcttacggatggcatgacagtaagagaattatgcagtgctgccataaccatgagtgataacactgcggccaacttacttctgacaacgatcggaggaccgaaggagctaaccgcttttttgcacaacatgggggatcatgtaactcgccttgatcgttgggaaccggagctgaatgaagccataccaaacgacgagcgtgacaccacgatgcctgtagcaatggcaacaacgttgcgcaaactattaactggcgaactacttactctagcttcccggcaacaattaatagactggatggaggcggataaagttgcaggaccacttctgcgctcggcccttccggctggctggtttattgctgataaatctggagccggtgagcgtgggtctcgcggtatcattgcagcactggggccagatggtaagccctcccgtatcgtagttatctacacgacggggagtcaggcaactatggatgaacgaaatagacagatcgctgagataggtgcctcactgattaagcattggtaactgtcagaccaagtttactcatatatactttagattgatttaaaacttcatttttaatttaaaaggatctaggtgaagatcctttttgataatctcatgaccaaaatcccttaacgtgagttttcgttccactgagcgtcagaccccgtagaaaagatcaaaggatcttcttgagatcctttttttctgcgcgtaatctgctgcttgcaaacaaaaaaaccaccgctaccagcggtggtttgtttgccggatcaagagctaccaactctttttccgaaggtaactggcttcagcagagcgcagataccaaatactgttcttctagtgtagccgtagttaggccaccacttcaagaactctgtagcaccgcctacatacctcgctctgctaatcctgttaccagtggctgctgccagtggcgataagtcgtgtcttaccgggttggactcaagacgatagttaccggataaggcgcagcggtcgggctgaacggggggttcgtgcacacagcccagcttggagcgaacgacctacaccgaactgagatacctacagcgtgagctatgagaaagcgccacgcttcccgaagggagaaaggcggacaggtatccggtaagcggcagggtcggaacaggagagcgcacgagggagcttccagggggaaacgcctggtatctttatagtcctgtcgggtttcgccacctctgacttgagcgtcgatttttgtgatgctcgtcaggggggcggagcctatggaaaaacgccagcaacgcggcctttttacggttcctggccttttgctggccttttgctcacatgttctttcctgcgttatcccctgattctgtggataaccgtattaccgcctttgagtgagctgataccgctcgccgcagccgaacgttgtttaattctgtgagcgtatggcaaacg

SEQ ID NO: 406 - protein, 197 aa, Homo sapiens
  Interleukin 18 Binding Protein Accession No. 095998
MRHNWTPDLSPLWVLLLCAHVVTLLVRATPVSQTTTAATASVRSTKDPCPSQPPVFPAAKQCPALEVTWPEVEVPLNGTLSLSCVACSRFPNFSILYWLGNGSFIEHLPGRLWEGSTSRERGSTGTQLCKALVLEQLTPALHSTNFSCVLVDPEQVVQRHVVLAQLWVRSPRRGLQEQEELCFHMWGGKGGLCQSSL

SEQ ID NO: 407 - protein, 193 aa, Homo sapiens
  IL18 Interleukin 18 Accession No. Q141116
MAAEPVEDNCINFVAMKFIDNTLYFIAEDDENLESDYFGKLESKLSVIRNLNDQVLFIDQGNRPLFEDMTDSDCRDNAPRTIFIISMYKDSQPRGMAVTISVKCEKISTLSCENKIISFKEMNPPDNIKDTKSDIIFFQRSVPGHDNKMQFESSSYEGYFLACEKERDLFKLILKKEDELGDRSIMFTVQNED

SEQ ID NO: 408 - protein, 578 aa, Homo sapiens
  IL10ra Interleukin 10 Receptor Alpha Accession No. NP_001549
MLPCLVVLLAALLSLRLGSDAHGTELPSPPSVWFEAEFFHHILHWTPIPNQSESTCYEVALLRYGIESWNSISNCSQTLSYDLTAVTLDLYHSNGYRARVRAVDGSRHSNWTVTNTRFSVDEVTLTVGSVNLEIHNGFILGKIQLPRPKMAPANDTYESIFSHFREYEIAIRKVPGNFTFTHKKVKHENFSLLTSGEVGEFCVQVKPSVASRSNKGMWSKEECISLTRQYFTVTNVIIFFAFVLLLSGALAYCLALQLYVRRRKKLPSVLLFKKPSPFIFISQRPSPETQDTIHPLDEEAFLKVSPELKNLDLHGSTDSGFGSTKPSLQTEEPQFLLPDPHPQADRTLGNGEPPVLGDSCSSGSSNSTDSGICLQEPSLSPSTGPTWEQQVGSNSRGQDDSGIDLVQNSEGRAGDTQGGSALGHHSPPEPEVPGEEDPAAVAFQGYLRQTRCAEEKATKTGCLEEESPLTDGLGPKFGRCLVDEAGLHPPALAKGYLKQDPLEMTLASSGAPTGQWNQPTEEWSLLALSSCSDLGISDWSFAHDLAPLGCVAAPGGLLGSFNSDLVTLPLISSLQSSE

SEQ ID NO: 409 - protein, 94 aa, Homo sapiens
  Cxcl11/I-TAC Accession No. NP_005400
MSVKGMAIALAVILCATVVQGFPMFKRGRCLCIGPGVKAVKVADIEKASIMYPSNNCDKIEVIITLKENKGQRCLNPKSKQARLIIKKVERKNF

SEQ ID NO: 410 - protein, 125 aa, Homo sapiens
  Cxcl9/Mig Accession No. NP_002407
MKKSGVLFLLGIILLVLIGVQGTPVVRKGRCSCISTNQGTIHLQSLKDLKQFAPSPSCEKIEIIATLKNGVQTCLNPDSADVKELIKKWEKQVSQKKKQKNGKKHQKKKVLKVRKSQRSRQKKTT

SEQ ID NO: 411 - protein, 93 aa, Homo sapiens
  Cxcl12/SDF-1-PBSF Accession No. NP_00600
MNAKVVVVLVLVLTALCLSDGKPVSLSYRCPCRFFESHVARANVKHLKILNTPNCALQIVARLKNNNRQVCIDPKLKWIQEYLEKALNKRFKM

SEQ ID NO: 412 - protein, 99 aa, Homo sapiens
  Ccl7/MARC Accession No.NP_006264
MKASAALLCLLLTAAAFSPQGLAQPVGINTSTTCCYRFINKKIPKQRLESYRRTTSSHCPREAVIFKTKLDKEICADPTQKWVQDFMKHLDKKTQTPKL

SEQ ID NO: 413 - protein, 112 aa, Homo sapiens
  Ccl27/ALP/CTACK/ILC/Eskine Accession No. NP_006655
MKGPPTFCSLLLLSLLLSPDPTAAFLLPPSTACCTQLYRKPLSDKLLRKVIQVELQEADGDCHLQAFVLHLAQRSICIHPQNPSLSQWFEHQERKLHGTLPKLNFGMLRKMG

SEQ ID NO: 414 - protein, 122 aa, Homo sapiens
  Ifi27 Interferon alpha-inducible protein 27 Accession No. NP_001123552
MEASALTSSAVTSVAKVVRVASGSAVVLPLARIATVVIGGVVAMAAVPMVLSAMGFTAAGIASSSIAAKMMSAAAIANGGGVASGSLVATLQSLGATGLSGLTKFILGSIGSAIAAVIARFY

SEQ ID NO: 415 - protein, 662 aa, Homo sapiens
  Mx1 Myxovirus (influenza virus) resistance 1 Accession No. NP_002453
MVVSEVDIAKADPAAASHPLLLNGDATVAQKNPGSVAENNLCSQYEEKVRPCIDLIDSLRALGVEQDLALPAIAVIGDQSSGKSSVLEALSGVALPRGSGIVTRCPLVLKLKKLVNEDKWRGKVSYQDYEIEISDASEVEKEINKAQNAIAGEGMGISHELITLEISSRDVPDLTLIDLPGITRVAVGNQPADIGYKIKTLIKKYIQRQETISLVVVPSNVDIATTEALSMAQEVDPEGDRTIGILTKPDLVDKGTEDKVVDVVRNLVFHLKKGYMIVKCRGQQEIQDQLSLSEALQREKIFFENHPYFRDLLEEGKATVPCLAEKLTSELITHICKSLPLLENQIKETHQRITEELQKYGVDIPEDENEKMFFLIDKINAFNQDITALMQGEETVGEEDIRLFTRLRHEFHKWSTIIENNFQEGHKILSRKIQKFENQYRGRELPGFVNYRTFETIVKQQIKALEEPAVDMLHTVTDMVRLAFTDVSIKNFEEFFNLHRTAKSKIEDIRAEQEREGEKLIRLHFQMEQIVYCQDQVYRGALQKVREKELEEEKKKKSWDFGAFQSSSATDSSMEEIFQHLMAYHQEASKRISSHIPLIIQFFMLQTYGQQLQKAMLQLLQDKDTYSWLLKERSDTSDKRKFLKERLARLTQARRRLAQFPG

SEQ ID NO: 416 - protein, 325 aa, Homo sapiens
  Irf1 Interferon regulatory factor 1 Accession No. NP_002189
MPITRMRMRPWLEMQINSNQIPGLIWINKEEMIFQIPWKHAAKHGWDINKDACLFRSWAIHTGRYKAGEKEPDPKTWKANFRCAMNSLPDIEEVKDQSRNKGSSAVRVYRMLPPLTKNQRKERKSKSSRDAKSKAKRKSCGDSSPDTFSDGLSSSTLPDDHSSYTVPGYMQDLEVEQALTPALSPCAVSSTLPDWHIPVEVVPDSTSDLYNFQVSPMPSTSEATTDEDEEGKLPEDIMKLLEQSEWQPTNVDGKGYLLNEPGVQPTSVYGDFSCKEEPEIDSPGGDIGLSLQRVFTDLKNMDATWLDSLLTPVRLPSIQAIPCAP

SEQ ID NO: 417 - protein, 750 aa, Homo sapiens
  STAT1 Accession No. P42224
MSQWYELQQLDSKFLEQVHQLYDDSFPMEIRQYLAQWLEKQDWEHAANDVSFATIRFHDLLSQLDDQYSRFSLENNFLLQHNIRKSKRNLQDNFQEDPIQMSMIIYSCLKEERKILENAQRFNQAQSGNIQSTVMLDKQKELDSKVRNVKDKVMCIEHEIKSLEDLQDEYDFKCKTLQNREHETNGVAKSDQKQEQLLLKKMYLMLDNKRKEVVHKIIELLNVTELTQNALINDELVEWKRRQQSACIGGPPNACLDQLQNWFTIVAESLQQVRQQLKKLEELEQKYTYEHDPITKNKQVLWDRTFSLFQQLIQSSFVVERQPCMPTHPQRPLVLKTGVQFTVKLRLLVKLQELNYNLKVKVLFDKDVNERNTVKGFRKFNILGTHTKVMNMEESTNGSLAAEFRHLQLKEQKNAGTRTNEGPLIVTEELHSLSFETQLCQPGLVIDLETTSLPVVVISNVSQLPSGWASILWYNMLVAEPRNLSFFLTPPCARWAQLSEVLSWQFSSVTKRGLNVDQLNMLGEKLLGPNASPDGLIPWTRFCKENINDKNFPFWLWIESILELIKKHLLPLWNDGCIMGFISKERERALLKDQQPGTFLLRFSESSREGAITFTWVERSQNGGEPDFHAVEPYTKKELSAVTFPDIIRNYKVMAAENIPENPLKYLYPNIDKDHAFGKYYSRPKEAPEPMELDGPKGTGYIKTELISVSEVHPSRLQTTDNLLPMSPEEFDEVSRIVGSVEFDSMMNTV

SEQ ID NO: 418 - protein, 478 aa, Homo sapiens
  Ifit1 Interferon-induced protein with tetratricopeptide repeats 1 Accession No. NP_001539
MSTNGDDHQVKDSLEQLRCHFTWELSIDDDEMPDLENRVLDQIEFLDTKYSVGIHNLLAYVKHLKGQNEEALKSLKEAENLMQEEHDNQANVRSLVTWGNFAWMYYHMGRLAEAQTYLDKVENICKKLSNPFRYRMECPEIDCEEGWALLKCGGKNYERAKACFEKVLEVDPENPESSAGYAISAYRLDGFKLATKNHKPFSLLPLRQAVRLNPDNGYIKVLLALKLQDEGQEAEGEKYIEEALANMSSQTYVFRYAAKFYRRKGSVDKALELLKKALQETPTSVLLHHQIGLCYKAQMIQIKEATKGQPRGQNREKLDKMIRSAIFHFESAVEKKPTFEVAHLDLARMYIEAGNHRKAEENFQKLLCMKPVVEETMQDIHFHYGRFQEFQKKSDVNAIIHYLKAIKIEQASLTRDKSINSLKKLVLRKLRRKALDLESLSLLGFVYKLEGNMNEALEYYERALRLAADFENSVRQGP

SEQ ID NO: 419 - protein, 515 aa, Homo sapiens [sequence omitted]

SEQ ID NO: 420 - protein, 498 aa, Homo sapiens
  Irf5 Interferon regulatory factor 5 Accession No. Q13568
MNQSIPVAPTPPRRVRLKPWLVAQVNSCQYPGLQWVNGEKKLFCIPWRHATRHGPSQDGDNTIFKAWAKETGKYTEGVDEADPAKWKANLRCALNKSRDFRLIYDGPRDMPPQPYKIYEVCSNGPAPTDSQPPEDYSFGAGEEEEEEEELQRMLPSLSLTEDVKWPPTLQPPTLRPPTLQPPTLQPPVVLGPPAPDPSPLAPPPGNPAGFRELLSEVLEPGPLPASLPPAGEQLLPDLLISPHMLPLTDLEIKFQYRGRPPRALTISNPHGCRLFYSQLEATQEQVELFGPISLEQVRFPSPEDIPSDKQRFYTNQLLDVLDRGLILQLQGQDLYAIRLCQCKVFWSGPCASAHDSCPNPIQREVKTKLFSLEHFLNELILFQKGQTNTPPPFEIFFCFGEEWPDRKPREKKLITVQVVPVAARLLLEMFSGELSWSADSIRLQISNPDLKDRMVEQFKELHHIWQSQQRLQPVAQAPPGAGLGVGQGPWPMHPAGMQ

SEQ ID NO: 421 - protein, 770 aa, Homo sapiens
  STAT3 Accession No. P40763
MAQWNQLQQLDTRYLEQLHQLYSDSFPMELRQFLAPWIESQDWAYAASKESHATLVFHNLLGEIDQQYSRFLQESNVLYQHNLRRIKQFLQSRYLEKPMEIARIVARCLWEESRLLQTAATAAQQGGQANHPTAAVVTEKQQMLEQHLQDVRKRVQDLEQKMKVVENLQDDFDFNYKTLKSQGDMQDLNGNNQSVTRQKMQQLEQMLTALDQMRRSIVSELAGLLSAMEYVQKTLTDEELADWKRRQQIACIGGPPNICLDRLENWITSLAESQLQTRQQIKKLEELQQKVSYKGDPIVQHRPMLEERIVELFRNLMKSAFVVERQPCMPMHPDRPLVIKTGVQFTTKVRLLVKFPELNYQLKIKVCIDKDSGDVAALRGSRKFNILGTNTKVMNMEESNNGSLSAEFKHLTLREQRCGNGGRANCDASLIVTEELHLITFETEVYHQGLKIDLETHSLPVVVISNICQMPNAWASILWYNMLTNNPKNVNFFTKPPIGTWDQVAEVLSWQFSSTTKRGLSIEQLTTLAEKLLGPGVNYSGCQITWAKFCKENMAGKGFSFWVWLDNIIDLVKKYILALWNEGYIMGFISKERERAILSTKPPGTFLLRFSESSKEGGVTFTWVEKDISGKTQIQSVEPYTKQQLNNMSFAEIIMGYKIMDATNILVSPLVYLYPDIPKEEAFGKYCRPESQEHPEADPGSAAPYLKTKFICVTPTTCSNTIDLPMSPRTLDSLMQFGNNGEGAEPSAGGQFESLTFDMELTSECATSPM

SEQ ID NO: 422 - protein, 147 aa, Homo sapiens
  Aif1 allograft inflammatory factor 1 Accession No. NP_001614
MSQTRDLQGGKAFGLLKAQQEERLDEINKQFLDDPKYSSDEDLPSKLEGFKEKYMEFDLNGNGDIDIMSLKRMLEKLGVPKTHLELKKLIGEVSSGSGETFSYPDFLRMMLGKRSAILKMILMYEEKAREKEKPTGPPAKKAISELP

SEQ ID NO: 423 - protein, 671 aa, Homo sapiens
  RIPK1 receptor (TNFRSF)-interacting serine-threonine kinase 1 Accession No. NP_003795
MQPDMSLNVIKMKSSDFLESAELDSGGFGKVSLCFHRTQGLMIMKTVYKGPNCIEHNEALLEEAKMMNRLRHSRVVKLLGVIIEEGKYSLVMEYMEKGNLMHVLKAEMSTPLSVKGRIILEIIEGMCYLHGKGVIHKDLKPENILVDNDFHIKIADLGLASFKMWSKLNNEEHNELREVDGTAKKNGGTLYYMAPEHLNDVNAKPTEKSDVYSFAVVLWAIFANKEPYENAICEQQLIMCIKSGNRPDVDDITEYCPREIISLMKLCWEANPEARPTFPGIEEKFRPFYLSQLEESVEEDVKSLKKEYSNENAVVKRMQSLQLDCVAVPSSRSNSATEQPGSLHSSQGLGMGPVEESWFAPSLEHPQEENEPSLQSKLQDEANYHLYGSRMDRQTKQQPRQNVAYNREEERRRRVSHDPFAQQRPYENFQNTEGKGTAYSSAASHGNAVHQPSGLTSQPQVLYQNNGLYSSHGFGTRPLDPGTAGPRVWYRPIPSHMPSLHNIPVPETNYLGNTPTMPFSSLPPTDESIKYTIYNSTGIQIGAYNYMEIGGTSSSLLDSTNTNFKEEPAAKYQAIFDNTTSLTDKHLDPIRENLGKHWKNCARKLGFTQSQIDEIDHDYERDGLKEKVYQMLQKWVMREGIKGATVGKLAQALHQCSRIDLLSSLIYVSQN

SEQ ID NO: 424 - protein, 372 aa, Homo sapiens [sequence omitted]

SEQ ID NO: 425 - protein, 789 aa, Homo sapiens
  TAX1BP1 Tax1 (human T-cell leukemia virus type 1) binding protein 1 Accession No. Q86VP1
MTSFQEVPLQTSNFAHVIFQNVAKSYLPNAHLECHYTLTPYIHPHPKDWVGIFKVGWSTARDYYTFLWSPMPEHYVEGSTVNCVLAFQGYYLPNDDGEFYQFCYVTHKGEIRGASTPFQFRASSPVEELLTMEDEGNSDMLVVTTKAGLLELKIEKTMKEKEELLKLIAVLEKETAQLREQVGRMERELNHEKERCDQLQAEQKGLTEVTQSLKMENEEFKKRFSDATSKAHQLEEDIVSVTHKAIEKETELDSLKDKLKKAQHEREQLECQLKTEKDEKELYKVHLKNTEIENTKLMSEVQTLKNLDGNKESVITHFKEEIGRLQLCLAEKENLQRTFLLTTSSKEDTCFLKEQLRKAEEQVQATRQEVVFLAKELSDAVNVRDRTMADLHTARLENEKVKKQLADAVAELKLNAMKKDQDKTDTLEHELRREVEDLKLRLQMAADHYKEKFKECQRLQKQINKLSDQSANNNNVFTKKTGNQQKVNDASVNTDPATSASTVDVKPSPSAAEADFDIVTKGQVCEMTKEIADKTEKYNKCKQLLQDEKAKCNKYADELAKMELKWKEQVKIAENVKLELAEVQDNYKELKRSLENPAERKMEGQNSQSPQCFKTCSEQNGYVLTLSNAQPVLQYGNPYASQETRDGADGAFYPDEIQRPPVRVPSWGLEDNVVCSQPARNFSRPDGLEDSEDSKEDENVPTAPDPPSQHLRGHGTGFCFDSSFDVHKKCPLCELMFPPNYDQSKFEEHVESHWKVCPMCSEQFPPDYDQQVFERHVQTHFDQNVLNFD

SEQ ID NO: 426 - protein, 1332 aa, Homo sapiens
  IKBKAP inhibitor of kappa light polypeptide enhancer in B-cells Accession No. NP_003631
MRNLKLFRTLEFRDIQGPGNPQCFSLRTEQGTVLIGSEHGLIEVDPVSREVKNEVSLVAEGFLPEDGSGRIVGVQDLLDQESVCVATASGDVILCSLSTQQLECVGSVASGISVMSWSPDQELVLLATGQQTLIMMTKDFEPILEQQIHQDDFGESKFITVGWGRKETQFHGSEGRQAAFQMQMHESALPWDDHRPQVTWRGDGQFFAVSVVCPETGARKVRVWNREFALQSTSEPVAGLGPALAWKPSGSLIASTQDKPNQQDIVFFEKNGLLHGHFTLPFLKDEVKVNDLLWNADSSVLAVWLEDLQREESSIPKTCVQLWTVGNYHWYLKQSLSFSTCGKSKIVSLMWDPVTPYRLHVLCQGWHYLAYDWHWTTDRSVGDNSSDLSNVAVIDGNRVLVTVFRQTVVPPPMCTYQLLFPHPVNQVTFLAHPQKSNDLAVLDASNQISVYKCGDCPSADPTVKLGAVGGSGFKVCLRTPHLEKRYKIQFENNEDQDVNPLKLGLLTWIEEDVFLAVSHSEFSPRSVIHHLTAASSEMDEEHGQLNVSSSAAVDGVIISLCCNSKTKSVVLQLADGQIFKYLWESPSLAIKPWKNSGGFPVRFPYPCTQTELAMIGEEECVLGLTDRCRFFINDIEVASNITSFAVYDEFLLLTTHSHTCQCFCLRDASFKTLQAGLSSNHVSHGEVLRKVERGSRIVTVVPQDTKLVLQMPRGNLEVVHHRALVLAQIRKWLDKLMFKEAFECMRKLRINLNLIYDHNPKVFLGNVETFIKQIDSVNHINLFFTELKEEDVTKTMYPAPVTSSVYLSRDPDGNKIDLVCDAMRAVMESINPHKYCLSILTSHVKKTTPELEIVLQKVHELQGNAPSDPDAVSAEEALKYLLHLVDVNELYDHSLGTYDFDLVLMVAEKSQKDPKEYLPFLNTLKKMETNYQRFTIDKYLKRYEKAIGHLSKCGPEYFPECLNLIKDKNLYNEALKLYSPSSQQYQDISIAYGEHLMQEHMYEPAGLMFARCGAHEKALSAFLTCGNWKQALCVAAQLNFTKDQLVGLGRTLAGKLVEQRKHIDAAMVLEECAQDYEEAVLLLLEGAAWEEALRLVYKYNRLDIIETNVKPSILEAQKNYMAFLDSQTATFSRHKKRLLVVRELKEQAQQAGLDDEVPHGQESDLFSETSSVVSGSEMSGKYSHSNSRISARSSKNRRKAERKKHSLKEGSPLEDLALLEALSEVVQNTENLKDEVYHILKVLFLFEFDEQGRELQKAFEDTLQLMERSLPEIWTLTYQQNSATPVLGPNSTANSIMASYQQQKTSVPVLDAELFIPPKINRRTQWKLSLLD

SEQ ID NO: 427 - protein, 941 aa, Homo sapiens
  ARTS1 type 1 tumor necrosis factor receptor shedding aminopeptidase regulator Accession No. NP_001035549
MVFLPLKWSLATMSFLLSSLLALLTVSTPSWCQSTEASPKRSDGTPFPWNKIRLPEYVIPVHYDLLIHANLTTLTFWGTTKVEITASQPTSTIILHSHHLQISRATLRKGAGERLSEEPLQVLEHPRQEQIALLAPEPLLVGLPYTVVIHYAGNLSETFHGFYKSTYRTKEGELRILASTQFEPTAARMAFPCFDEPAFKASFSIKIRREPRHLAISNMPLVKSVTVAEGLIEDHFDVTVKMSTYLVAFIISDFESVSKITKSGVKVSVYAVPDKINQADYALDAAVTLLEFYEDYFSIPYPLPKQDLAAIPDFQSGAMENWGLTTYRESALLFDAEKSSASSKLGITMTVAHELAHQWFGNLVTMEWWNDLWLNEGFAKFMEFVSVSVTHPELKVGDYFFGKCFDAMEVDALNSSHPVSTPVENPAQIREMFDDVSYDKGACILNMLREYLSADAFKSGIVQYLQKHSYKNTKNEDLWDSMASICPTDGVKGMDGFCSRSQHSSSSSHWHQEGVDVKTMMNTWTLQKGFPLITITVRGRNVHMKQEHYMKGSDGAPDTGYLWHVPLTFITSKSDMVHRFLLKTKTDVLILPEEVEWIKFNVGMNGYYIVHYEDDGWDSLTGLLKGTHTAVSSNDRASLINNAFQLVSIGKLSIEKALDLSLYLKHETEIMPVFQGLNELIPMYKLMEKRDMNEVETQFKAFLIRLLRDLIDKQTWTDEGSVSERMLRSQLLLLACVHNYQPCVQRAEGYFRKWKESNGNLSLPVDVTLAVFAVGAQSTEGWDFLYSKYQFSLSSTEKSQIEFALCRTQNKEKLQWLLDESFKGDKIKTQEFPQILTLIGRNPVGYPLAWQFLRKNWNKLVQKFELGSSSIAHMVMGTTNQFSTRTRLEEVKGFFSSLKENGSQLRCVQQTIETIEENIGWMDKNFDKIRVWLQSEKLERM

SEQ ID NO: 428 - protein, 191 aa, Homo sapiens
  NKIRAS2 NFKB inhibitor interacting Ras-like protein 2 Accession No. NP_001001349
MGKSCKVVVCGQASVGKTSILEQLLYGNHVVGSEMIETQEDIYVGSIETDRGVREQVRFYDTRGLRDGAELPRHCFSCTDGYVLVYSTDSRESFQRVELLKKEIDKSKDKKEVTIVVLGNKCDLQEQRRVDPDVAQHWAKSEKVKLWEVSVADRRSLLEPFVYLASKMTQPQSKSAFPLSRKNKGSGSLDG

SEQ ID NO: 429 - protein, 160 aa, Homo sapiens
  LY96 lymphocyte antigen 96 Accession No. NP_056179
MLPFLFFSTLFSSIFTEAQKQYWVCNSSDASISYTYCDKMQYPISINVNPCIELKGSKGLLHIFYIPRRDLKQLYFNLYITVNTMNLPKRKEVICRGSDDDYSFCRALKGETVNTTISFSFKGIKFSKGKYKCVVEAISGSPEEMLFCLEFVILHQPNSN

SEQ ID NO: 430 - protein, 131 aa, Homo sapiens
  LY6E lymphocyte antigen 6 complex, locus E Accession No. Q16553
MKIFLPVLLAALLGVERASSLMCFSCLNQKSNLYCLKPTICSDQDNYCVTVSASAGIGNLVTFGHSLSKTCSPACPIPEGVNVGVASMGISCCQSFLCNFSAADGGLRASVTLLGAGLLLSLLPALLRFGP

SEQ ID NO: 431 - protein, 784 aa, Homo sapiens
  TLR2 toll-like receptor 2 Accession No. NP_003255
MPHTLWMVWVLGVIISLSKEESSNQASLSCDRNGICKGSSGSLNSIPSGLTEAVKSLDLSNNRITYISNSDLQRCVNLQALVLTSNGINTIEEDSFSSLGSLEHLDLSYNYLSNLSSSWFKPLSSLTFLNLLGNPYKTLGETSLFSHLTKLQILRVGNMDTFTKIQRKDFAGLTFLEELEIDASDLQSYEPKSLKSIQNVSHLILHMKQHILLLEIFVDVTSSVECLELRDTDLDTFHFSELSTGETNSLIKKFTFRNVKITDESLFQVMKLLNQISGLLELEFDDCTLNGVGNFRASDNDRVIDPGKVETLTIRRLHIPRFYLFYDLSTLYSLTERVKRITVENSKVFLVPCLLSQHLKSLEYLDLSENLMVEEYLKNSACEDAWPSLQTLILRQNHLASLEKTGETLLTLKNLTNIDISKNSFHSMPETCQWPEKMKYLNLSSTRIHSVTGCIPKTLEILDVSNNNLNLFSLNLPQLKELYISRNKLMTLPDASLLPMLLVLKISRNAITTFSKEQLDSFHTLKTLEAGGNNFICSCEFLSFTQEQQALAKVLIDWPANYLCDSPSHVRGQQVQDVRLSVSECHRTALVSGMCCALFLLILLTGVLCHRFHGLWYMKMMWAWLQAKRKPRKAPSRNICYDAFVSYSERDAYWVENLMVQELENFNPPFKLCLHKRDFIPGKWIIDNIIDSIEKSHKTVFVLSENFVKSEWCKYELDFSHFRLFDENNDAAILILLEPIEKKAIPQRFCKLRKIMNTKTYLEWPMDEAQREGFWVNLRAAIKS

SEQ ID NO: 432 - protein, 427 aa, Homo sapiens
  IL13RA1 Interleukin-13 receptor alpha-1 chain Accession No. P78552
MEWPARLCGLWALLLCAGGGGGGGGAAPTETQPPVTNLSVSVENLCTVIWTWNPPEGASSNCSLWYFSHFGDKQDKKIAPETRRSIEVPLNERICLQVGSQCSTNESEKPSILVEKCISPPEGDPESAVTELQCIWHNLSYMKCSWLPGRNTSPDTNYTLYYWHRSLEKIHQCENIFREGQYFGCSFDLTKVKDSSFEQHSVQIMVKDNAGKIKPSFNIVPLTSRVKPDPPHIKNLSFHNDDLYVQWENPQNFISRCLFYEVEVNNSQTETHNVFYVQEAKCENPEFERNVENTSCFMVPGVLPDTLNTVRIRVKTNKLCYEDDKLWSNWSQEMSIGKKRNSTLYITMLLIVPVIVAGAIIVLLLYLKRLKIIIFPPIPDPGKIFKEMFGDQNDDTLHWKKYDIYEKQTKEETDSVVLIENLKKASQ

SEQ ID NO: 433 - protein, 459 aa, Homo sapiens [sequence omitted]

SEQ ID NO: 434 - protein, 344 aa, Homo sapiens
  CCRL2 chemokine (C-C motif) receptor-like 2 Accession No. O0042
MANYTLAPEDEYDVLIEGELESDEAEQCDKYDAQALSAQLVPSLCSAVFVIGVLDNLLVVLILVKYKGLKRVENIYLLNLAVSNLCFLLTLPFWAHAGGDPMCKILIGLYFVGLYSETFFNCLLTVQRYLVFLHKGNFFSARRRVPCGIITSVLAWVTAILATLPEFVVYKPQMEDQKYKCAFSRTPFLPADETFWKHFLTLKMNISVLVLPLFIFTFLYVQMRKTLRFREQRYSLFKLVFAIMVVFLLMWAPYNIAFFLSTFKEHFSLSDCKSSYNLDKSVHITKLIATTHCCINPLLYAFLDGTFSKYLCRCFHLRSNTPLQPRGQSAQGTSREEPDHSTEV

SEQ ID NO: 435 - protein, 229 aa, Homo sapiens
  EB13 Epstein-Barr virus induced gene 3 Accession No. Q14213
MTPQLLLALVLWASCPPCSGRKGPPAALTLPRVQCRASRYPIAVDCSWTLPPAPNSTSPVSFIATYRLGMAARGHSWPCLQQTPTSTSCTITDVQLFSMAPYVLNVTAVHPWGSSSSFVPFITEHIIKPDPPEGVRLSPLAERQLQVQWEPPGSWPFPEIFSLKYWIRYKRQGAARFHRVGPIEATSFILRAVRPRARYYVQVAAQDLTDYGELSDWSLPATATMSLGK

SEQ ID NO: 436 - protein, 133 aa, Homo sapiens
  interferon-induced transmembrane protein 3 Acccession No. Q01628
MNHTVQTFFSPVNSGQPPNYEMLKEEHEVAVLGAPHNPAPPTSTVIHIRSETSVPDHVVWSLFNTLFMNPCCLGFIAFAYSVKSRDRKMVGDVTGAQAYASTAKCLNIWALILGILMTILLIVIPVLIFQAYG

SEQ ID NO: 437 - protein, 337 aa, Homo sapiens
  IFNGR2 Interferon gamma receptor 2 (interferon gamma tranducer 1) Accession No.  P38484
MRPTLLWSLLLLLGVFAAAAAAPPDPLSQLPAPQHPKIRLYNAEQVLSWEPVALSNSTRPVVYQVQFKYTDSKWFTADIMSIGVNCTQITATECDFTAASPSAGFPMDFNVTLRLRAELGALHSAWVTMPWFQHYRNVTVGPPENIEVTPGEGSLIIRFSSPFDIADTSTAFFCYYVHYWEKGGIQQVKGPFRSNSISLDNLKPSRVYCLQVQAQLLWNKSNIFRVGHLSNISCYETMADASTELQQVILISVGTFSLLSVLAGACFFLVLKYRGLIKYWFHTPPSIPLQIEEYLKDPTQPILEALDKDSSPKDDVWDSVSIISFPEKEQEDVLQTL

SEQ ID NO: 438 - protein, 132 aa, Homo sapiens
  IFITM2 Interferon-induced transmembrane protein 2 Accession No. Q01629
MNHIVQTFSPVNSGQPPNYEMLKEEQEVAMLGGPHNPAPPTSTVIHIRSETSVPDHVVWSLFNTLFMNTCCLGFIAFAYSVKSRDRKMVGDVTGAQAYASTAKCLNIWALILGIFMTILLVIIPVLVVQAQR

SEQ ID NO: 439 - protein, 125 aa, Homo sapiens
  IFITM1 Interferon-induced transmembrane protein 1 Accession No. P13164
MHKEEHEVAVLGAPPSTILPRSTVINIHSETSVPDHVVWSLFNTLFLNWCCLGFIAFAYSVKSRDRKMVGDVTGAQAYASTAKCLNIWALILGILMTIGFILLLVFGSVTVYHIMLQIIQEKRGY

SEQ ID NO: 440 - protein, 514 aa, Homo sapiens
  OASL 2'-5'-oligoadenylate synthetase-like protein Accession No. Q15646
MALMQELYSTPASRLDSFVAQWLQPHREWKEEVLDAVRTVEEFLRQEHFQGKRGLDQDVRVLKVVKVGSFGNGTVLRSTREVELVAFLSCFHSFQEAAKHHKDVLRLIWKTMWQSQDLLDLGLEDLRMEQRVPDALVFTIQTRGTAEPITVTIVPAYRALGPSLPNSQPPPEVYVSLIKACGGPGNFCPSFSELQRNFVKHRPTKLKSLLRLVKHWYQQYVKARSPRANLPPLYALELLTIYAWEMGTEEDENFMLDEGFTTVMDLLLEYEVICIYWTKYYTLHNAIIEDCVRKQLKKERPIILDPADPTLNVAEGYRWDIVAQRASQCLKQDCCYDNRENPISSWNVKRARDIHLTVEQRGYPDFNLIVNPYEPIRKVKEKIRRTRGYSGLQRLSFQVPGSERQLLSSRCSLAKYGIFSHTHIYLLETIPSEIQVFVKNPDGGSYAYAINPNSFILGLKQQIEDQQGLPKKQQQLEFQGQVLQDWLGLGIYGIQDSDTLILSKKKGEALFPAS

SEQ ID NO: 441 - protein, 503 aa, Homo sapiens
  IRF7 Interferon regulatory factor 7 Accession No. Q92985
MALAPERAAPRVLFGEWLLGEISSGCYEGLQWLDEARTCFRVPWKHFARKDLSEADARIFKAWAVARGRWPPSSRGGGPPPEAETAERAGWKTNFRCALRSTRRFVMLRDNSGDPADPHKVYALSRELCWREGPGTDQTEAEAPAAVPPPQGGPPGPFLAHTHAGLQAPGPLPAPAGDKGDLLLQAVQQSCLADHLLTASWGADPVPTKAPGEGQEGLPLTGACAGGPGLPAGELYGWAVETTPSPGPQPAALTTGEAAAPESPHQAEPYLSPSPSACTAVQEPSPGALDVTIMYKGRTVLQKVVGHPSCTFLYGPPDPAVRATDPQQVAFPSPAELPDQKQLRYTEELLRHVAPGLHLELRGPQLWARRMGKCKVYWEVGGPPGSASPSTPACLLPRNCDTPIFDFRVFFQELVEFRARQRRGSPRYTIYLGFGQDLSAGRPKEKSLVLVKLEPWLCRVHLEGTQREGVSSLDSSSLSLCLSSANSLYDDIECFLMELEQPA

SEQ ID NO: 442 - protein, 325 aa, Homo sapiens; identical to SEQ ID NO: 416
  IRF1 Interferon regulatory factor 1 Accession No. P10914

SEQ ID NO: 443 - protein, 111 aa, Homo sapiens
  NGFRAP1 Nerve growth factor receptor (TNFRSF16) associated Protein Accession No. Q00994
MANIHQENEEMEQPMQNGEEDRPLGGGEGHQPAGNRRGQARRLAPNFRWAIPNRQINDGMGGDGDDMEIFMEEMREIRRKLRELQLRNCLRILMGELSNHHDHHDEFCLMP

SEQ ID NO: 444 - protein, 461 aa, Homo sapiens
  TBFB1L1 Transforming growth factor beta-1-induced transcript 1 protein Accession No. O43294
MEDLDALLSDLETTTSHMPRSGAPKERPAEPLTPPPSYGHQPQTGSGESSGASGDKDHLYSTVCKPRSPKPAAPAAPPFSSSSGVLGTGLCELDRLLQELNATQFNITDEIMSQFPSSKVASGEQKEDQSEDKKRPSLPSSPSPGLPKASATSATLELDRLMASLSDFRVQNHLPASGPTQPPVVSSTNEGSPSPPEPTGKGSLDTMLGLLQSDLSRRGVPTQAKGLCGSCNKPIAGQVVTALGRAWHPEHFVCGGCSTALGGSSFFEKDGAPFCPECYFERFSPRCGFCNQPIRHKMVTALGTHWHPEHFCCVSCGEPFGDEGFHEREGRPYCRRDFLQLFAPRCQGCQGPILDNYISALSALWHPDCFVCRECFAPFSGGSFFEHEGRPLCENHFHARRGSLCATCGLPVTGRCVSALGRRFHPDHFTCTFCLRPLTKGSFQERAGKPYCQPCFLKLFG

SEQ ID NO: 445 - protein, 124 aa, Homo sapiens
  TAX1BP3 Tax1 (human T-cell lukemia virus type 1)binding protein 3 Accession No. O14907
MSYIPGQPVTAVVQRVEIHKLRQGENLILGFSIGGGIDQDPSQNPFSEDKTDKGIYVTRVSEGGPAEIAGLQIGDKIMQVNGWDMTMVTHDQARKRLTKRSEEVVRLLVTRQSLQKAVQQSMLS

SEQ ID NO: 446 - protein, 192 aa, Homo sapiens
  BAX BCL2-associated X protein Accession No Q07812
MDGSGEQPRGGGPTSSEQIMKTGALLLQGFIQDRAGRMGGEAPELALDPVPQDASTKKLSECLKRIGDELDSNMELQRMIAAVDTDSPREVFFRVAADMFSDGNFNWGRVVALFYFASKLVLKALCTKVPELIRTIMGWTLDFLRERLLGWIQDQGGWDGLLSYFGTPTWQTVTIFVAGVLTASLTIWKKMG

SEQ ID NO: 447 - protein, 381 aa, Homo sapiens
  PTX3 Pentraxin-related gene, rapidly induced by IL-1 beta Accession No. P26022
MHLLAILFCALWSAVLAENSDDYDLMYVNLDNEIDNGLHPTEDPTPCDCGQEHSEWDKLFIMLENSQMRERMLLQATDDVLRGELQRLREELGRLAESLARPCAPGAPAEARLTSALDELLQATRDAGRRLARMEGAEAQRPEEAGRALAAVLEELRQTRADLHAVQGWAARSWLPAGCETAILFPMRSKKIFGSVHPVRPMRLESFSACIWVKATDVLNKTILFSYGTKRNPYEIQLYLSYQSIVFVVGGEENKLVAEAMVSLGRWTHLCGTWNSEEGLTSLWVNGELAATTVEMATGHIVPEGGILQIGQEKNGCCVGGGFDETLAFSGRLTGFNIWDSVLSNEEIRETGGAESCHIRGNIVGWGVTEIQPHGGAQYVS

SEQ ID NO: 448 - protein, 447 aa, Homo sapiens
  BAG5 BCL2-associated anthanogene 5 Accession No. Q9UL15
MDMGNQHPSISRLQEIQKEVKSVEQQVIGFSGLSDDKNYKKLERILTKQLFEIDSVDTEGKGDIQQARKRAAQETERLLKELEQNANHPHRIEIQNIFEEAQSLVREKIVPFYNGGNCVTDEFEEGIQDIILRLTHVKTGGKISLRKARYHTLTKICAVQEIIEDCMKKQPSLPLSEDAHPSVAKINFVMCEVNKARGVLIALLMGVNNNETCRHLSCVLSGLIADLDALDVCGRTEIRNYRREVVEDINKLLKYLDLEEEADTTKAFDLRQNHSILKIEKVLKRMREIKNELLQAQNPSELYLSSKTELQGLIGQLDEVSLEKNPCIREARRRAVIEVQTLITYIDLKEALEKRKLFACEEHPSHKAVWNVLGNLSEIQGEVLSFDGNRTDKNYIRLEELLTKQLLALDAVDPQGEEKCKAARKQAVRLAQNILSYLDLKSDEWEY

SEQ ID NO: 449 - protein, 207 aa, Homo sapiens; identical to SEQ ID NO: 152
  TIMP1 Metalloproteinase inhibitor 1 Accession No. P01033

SEQ ID NO: 450 - protein, 156 aa, Homo sapiens
  IER3  Immediate early response 3 Accession No. P46695
MCHSRSCHPTMTILQAPTPAPSTIPGPRRGSGPEIFTFDPLPEPAAAPAGRPSASRGHRKRSRRVLYPRVVRRQLPVEEPNPAKRLLFLLLTIVFCQILMAEEGVPAPLPPEDAPNAASLAPTPVSPVLEPFNLTSEPSDYALDLSTFLQQHPAAF

SEQ ID NO: 451 - protein, 1531 aa, Homo sapiens
  NFAT5 Nuclear factor of activated T-cells Accession No. O94916
MPSDFISLLSADLDLESPKSLYSRESVYDLLPKELQLPPSRETSVASMSQTSGGEAGSPPPAVVAADASSAPSSSSMGGACSSFTTSSSPTIYSTSVTDSKAMQVESCSSAVGVSNRGVSEKQLTSNTVQQHPSTPKRHTVLYISPPPEDLLDNSRMSCQDEGCGLESEQSCSMWMEDSPSNFSNMSTSSYNDNTEVPRKSRKRNPKQRPGVKRRDCEESNMDIFDADSAKAPHYVLSQLTTDNKGNSKAGNGTLENQKGTGVKKSPMLCGQYPVKSEGKELKIVVQPETQHRARYLTEGSRGSVKDRTQQGFPTVKLEGHNEPVVLQVFVGNDSGRVKPHGFYQACRVTGRNTTPCKEVDIEGTTVIEVGLDPSNNMTLAVDCVGILKLRNADVEARIGIAGSKKKSTRARLVFRVNIMRKDGSTLTLQTPSSPILCTQPAGVPEILKKSLHSCSVKGEEEVFLIGKNFLKGTKVIFQENVSDENSWKSEAEIDMELFHQNHLIVKVPPYHDQHITLPVSVGIYVVTNAGRSHDVQPFTYTPDPAAAGALNVNVKKEISSPARPCSFEEAMKAMKTTGCNLDKVNIIPNALMTPLIPSSMIKSEDVTPMEVTAEKRSSTIFKTTKSVGSTQQTLENISNIAGNGSFSSPSSSHLPSENEKQQQIQPKAYNPETLTTIQTQDISQPGTFPAVSASSQLPNSDALLQQATQFQTRETQSREILQSDGTVVNLSQLTEASQQQQQSPLQEQAQTLQQQISSNIFPSPNSVSQLQNTIQQLQAGSFTGSTASGSSGSVDLVQQVLEAQQQLSSVLFSAPDGNENVQEQLSADIFQQVSQIQSGVSPGMFSSTEPTVHTRPDNLLPGRAESVHPQSENTLSNQQQQQQQQQQVMESSAAMVMEMQQSICQAAAQIQSELFPSTASANGNLQQSPVYQQTSHMMSALSTNEDMQMQCELFSSPPAVSGNETSTTTTQQVATPGTTMFQTSSSGDGEETGTQAKQIQNSVFQTMVQMQHSGDNQPQVNLFSSTKSMMSVQNSGTQQQGNGLFQQGNEMMSLQSGNFLQQSSHSQAQLFHPQNPIADAQNLSQETQGSLFHSPNPIVHSQTSTTSSEQMQPPMFHSQSTIAVLQGSSVPQDQQSTNIFLSQSPMNNLQTNTVAQEAFFAAPNSISPLQSTSNSEQQAAFQQQAPISHIQTPMLSQEQAQPPQQGLFQPQVALGSLPPNPMPQSQQGTMFQSQHSIVAMQSNSPSQEQQQQQQQQQQQQQQQQQSILFSNQNTMATMASPKQPPPNMIFNPNQNPMANQEQQNQSIFHQQSNMAPMNQEQQPMQFQSQSTVSSLQNPGPTQSESSQTPLFHSSPQIQLVQGSPSSQEQQVTLFLSPASMSALQTSINQQDMQQSPLYSPQNNMPGIQGATSSPQPQATLFHNTAGGTMNQLQNSPGSSQQTSGMFLFGIQNNCSQLLTSGPATLPDQLMAISQPGQPQNEGQPPVTTLLSQQMPENSPLASSINTNQNIEKIDLLVSLQNQGNNLTGSF

SEQ ID NO: 452 - protein, 558 aa, Homo sapiens
  BAT5 HLA-B associated transcript 5 Accession No. O95870
MAKLLSCVLGPRLYKIYRERDSERAPASVPETPTAVTAPHSSSWDTYYQPRALEKHADSILALASVFWSISYYSSPFAFFYLYRKGYLSLSKVVPFSHYAGTLLLLLAGVACLRGIGRWTNPQYRQFITILEATHRNQSSENKRQLANYNFDFRSWPVDFHWEEPSSRKESRGGPSRRGVALLRPEPLHRGTADTLLNRVKKLPCQITSYLVAHTLGRRMLYPGSVYLLQKALMPVLLQGQARLVEECNGRRAKLLACDGNEIDTMFVDRRGTAEPQGQKLVICCEGNAGFYEVGCVSTPLEAGYSVLGWNHPGFAGSTGVPFPQNEANAMDVVVQFAIHRLGFQPQDIIIYAWSIGGFTATWAAMSYPDVSAMILDASFDDLVPLALKVMPDSWRGLVTRTVRQHLNLNNAEQLCRYQGPVLLIRRTKDEIITTTVPEDIMSNRGNDLLLKLLQHRYPRVMAEEGLRVVRQWLEASSQLEEASIYSRWEVEEDWCLSVLRSYQAEHGPDFPWSVGEDMSADGRRQLALFLARKHLHNFEATHCTPLPAQNFQMPWHL

SEQ ID NO: 453 - protein, 255 aa, Homo sapiens
  TNFRSFR9 necrosis factor receptor superfamily member 9 Accession No. Q07011
MGNSCYNIVATLLLVLNFERTRSLQDPCSNCPAGTFCDNNRNQICSPCPPNSFSSAGGQRTCDICRQCKGVFRTRKECSSTSNAECDCTPGFHCLGAGCSMCEQDCKQGQELTKKGCKDCCFGTFNDQKRGICRPWTNCSLDGKSVLVNGTKERDVVCGPSPADLSPGASSVTPPAPAREPGHSPQIISFFLALTSTALLFLLFFLTLRFSVVKRGRKKLLYIFKQPFMRPVQTTQEEDGCSCRFPEEEEGGCEL

SEQ ID NO: 454 - protein, 125 aa, Homo sapiens
  LY6G6E Lymphocyte antigen 6 comples, locus 6GE Accession No. Q9UMP8
MGTSSIFLCVLFLCGALGLTMSPARGRLRCYICGFTKPCHPVPTECRDDEACGISIGTSGKSCLSRAQCPLPGYATYWLHSYTLWHHCCEQDLCNIAASPQQLTSLLASLPLFVASFAGRGHLLH

SEQ ID NO: 455 - protein, 144 aa, Homo sapiens; identical to SEQ ID NO: 103
  CSF2 Granulocyte-macrophage colony-stimulating factor Accession No. P04141

SEQ ID NO: 456 - protein, 281 aa, Homo sapiens [sequence omitted]

SEQ ID NO: 457 - protein, 371 aa, Homo sapiens
  CRLF2 Cytokine receptor-like factor 2 Accession No. Q9HC73
MGRLVLLWGAAVFLLGGWMALGQGGAAEGVQIQIIYFNLETVQVTWNASKYSRTNLTFHYRFNGDEAYDQCTNYLLQEGHTSGCLLDAEQRDDILYFSIRNGTHPVFTASRWMVYYLKPSSPKHVRFSWHQDAVTVTCSDLSYGDLLYEVQYRSPFDTEWQSKQENTCNVTIEGLDAEKCYSFWVRVKAMEDVYGPDTYPSDWSEVTCWQRGEIRDACAETPTPPKPKLSKFILISSLAILLMVSLLLLSLWKLWRVKKFLIPSVPDPKSIFPGLFEIHQGNFQEWITDTQNVAHLHKMAGAEQESGPEEPLVVQLAKTEAESPRMLDPQTEEKEASGGSLQLPHQPLQGGDVVTIGGFTFVMNDRSYVAL

SEQ ID NO: 458 - protein, 352 aa, Homo sapiens
  LTB4R Leukotriene B4 receptor 1 Acccession No. Q15722
MNTTSSAAPPSLGVEFISLLAIILLSVALAVGLPGNSFVVWSILKRMQKRSVTALMVLNLALADLAVLLTAPFFLHFLAQGTWSFGLAGCRLCHYVCGVSMYASVLLITAMSLDRSLAVARPFVSQKLRTKAMARRVLAGIWVLSFLLATPVLAYRTVVPWKTNMSLCFPRYPSEGHRAFHLIFEAVTGFLLPFLAVVASYSDIGRRLQARRFRRSRRTGRLVVLIILTFAAFWLPYHVVNLAEAGRALAGQAAGLGLVGKRLSLARNVLIALAFLSSSVNPVLYACAGGGLLRSAGVGFVAKLLEGTGSEASSTRRGGSLGQTARSGPAALEPGPSESLTASSPLKLNELN

SEQ ID NO: 459 - protein, 119 aa, Homo sapiens; identical to SEQ ID NO: 75
  B2M Beta-2 microglobulin Accession No. P61769

SEQ ID NO: 460 - protein, 591 aa, Homo sapiens
  GBP2 Interferon-induced guanylate-binding protein 2 Accession No. P32456
MAPEINLPGPMSLIDNTKGQLVVNPEALKILSAITQPVVVVAIVGLYRTGKSYLMNKLAGKKNGFSLGSTVKSHTKGIWMWCVPHPKKPEHTLVLLDTEGLGDIEKGDNENDSWIFALAILLSSTFVYNSMGTINQQAMDQLHYVTELTDRIKANSSPGNNSVDDSADFVSFFPAFVWTLRDFTLELEVDGEPITADDYLELSLKLRKGTDKKSKSFNDPRLCIRKFFPKRKCFVFDWPAPKKYLAHLEQLKEEELNPDFIEQVAEFCSYILSHSNVKTLSGGIAVNGPRLESLVLTYVNAISSGDLPCMENAVLALAQIENSAAVEKAIAHYEQQMGQKVQLPTETLQELLDLHRDSEREAIEVFMKNSFKDVDQMFQRKLGAQLEARRDDFCKQNSKASSDCCMALLQDIFGPLEEDVKQGTFSKPGGYRLFTQKLQELKNKYYQVPRKGIQAKEVLKKYLESKEDVADALLQTDQSLSEKEKAIEVERIKAESAEAAKKMLEEIQKKNEEMMEQKEKSYQEHVKQLTEKMERDRAQLMAEQEKTLALKLQEQERLLKEGFENESKRLQKDIWDIQMRSKSLEPICNIL

SEQ ID NO: 461 - protein, 374 aa, Homo sapiens
  PBX4 Pre-B-cell leukemia homeobox 4 Accession No. Q9BYU1
MAAPPRPAPSPPAPRRLDTSDVLQQIMAITDQSLDEAQARKHALNCHRMKPALFSVLCEIKEKTVVSIRGIQDEDPPDAQLLRLDNMLLAEGVCRPEKRGRGGAVARAGTATPGGCPNDNSIEHSDYRAKLSQIRQIYHSELEKYEQACREFTTHVTNLLQEQSRMRPVSPKEIERMVGAIHGKFSAIQMQLKQSTCEAVMTLRSRLLDARRKRRNFSKQATEVLNEYFYSHLNNPYPSEEAKEELARKGGLTISQVSNWFGNKRIRYKKNMGKFQEEATIYTGKTAVDTTEVGVPGNHASCLSTPSSGSSGPFPLPSAGDAFLTLRTLASLQPPPGGGCLQSQAQGSWQGATPQPATASPAGDPGSINSSTSN

SEQ ID NO: 462 - protein, 317 aa, Homo sapiens
  NFKBIA NF-kappa-B inhibitor alpha Accession No. P25963
MFQAAERPQEWAMEGPRDGLKKERLLDDRHDSGLDSMKDEEYEQMVKELQEIRLEPQEVPRGSEPWKQQLTEDGDSFLHLAIIHEEKALTMEVIRQVKGDLAFLNFQNNLQQTPLHLAVITNQPEIAEALLGAGCDPELRDFRGNTPLHLACEQGCLASVGVLTQSCTTPHLHSILKATNYNGHTCLHLASIHGYLGIVELLVSLGADVNAQEPCNGRTALHLAVDLQNPDLVSLLLKCGADVNRVTYQGYSPYQLTWGRPSTRIQQQLGQLTLENLQMLPESEDEESYDTESEFTEFTEDELPYDDCVFGGQRLTL

SEQ ID NO: 463 - protein, 366 aa, Homo sapiens [sequence omitted]

SEQ ID NO: 464 - protein, 362 aa, Homo sapiens
  HLA-H Putative HLA class I histocompatibility antigen, alpha chain H Accession No. P01893
MAVMAPRTLLLLLSGALALTQTWARSHSMRYFYTTMSRPGAGEPRFISVGYVDDTQFVRFDSDDASPREEPRAPWMEREGPKYWDRNTQICKAQAQTERENLRIALRYYNQSEGGSHTMQVMYGCDVGPDGPFLRGYEQHAYDGKDYIALNEDLRSWTAADMAAQITKRKWEAARRAEQRRVYLEGEFVEWLRRYLENGKETLQRADPPKTHMTHHPISDHEATLRCWALGFYPAEITLTWQRDGEDQTQDTELVETRPAGDGTFQKWAAVVVPSGEEQRYTCHVQHEGLPEPLTLRWEPSSQPTVPIVGIVAGLVLLVAVVTGAVVAAVMWRKKSSDRKGGSYSQAASSNSAQGSDVSLTA

SEQ ID NO: 465 - protein, 338 aa, Homo sapiens
  HLA-G HLA class I histocompatibility antigen, alpha chain G Accession No. P17693
MVVMAPRTLFLLLSGALTLTETWAGSHSMRYFSAAVSRPGRGEPRFIAMGYVDDTQFVRFDSDSACPRMEPRAPWVEQEGPEYWEEETRNTKAHAQTDRMNLQTLRGYYNQSEASSHTLQWMIGCDLGSDGRLLRGYEQYAYDGKDYLALNEDLRSWTAADTAAQISKRKCEAANVAEQRRAYLEGTCVEWLHRYLENGKEMLQRADPPKTHVTHHPVFDYEATLRCWALGFYPAEIILTWQRDGEDQTQDVELVETRPAGDGTFQKWAAVVVPSGEEQRYTCHVQHEGLPEPLMLRWKQSSLPTIPIMGIVAGLVVLAAVVTGAAVAAVLWRKKSSD

SEQ ID NO: 466 - protein, 706 aa, Homo sapiens
  BCL6 B-cell lymphoma 6 protein Accession No. P41182
MASPADSCIQFTRHASDVLLNLNRLRSRDILTDVVIVVSREQFRAHKTVLMACSGLFYSIFTDQLKCNLSVINLDPEINPEGFCILLDFMYTSRLNLREGNIMAVMATAMYLQMEHVVDTCRKFIKASEAEMVSAIKPPREEFLNSRMLMPQDIMAYRGREVVENNLPLRSAPGCESRAFAPSLYSGLSTPPASYSMYSHLPVSSLLFSDEEFRDVRMPVANPFPKERALPCDSARPVPGEYSRPTLEVSPNVCHSNIYSPKETIPEEARSDMHYSVAEGLKPAAPSARNAPYFPCDKASKEEERPSSEDEIALHFEPPNAPLNRKGLVSPQSPQKSDCQPNSPTESCSSKNACILQASGSPPAKSPTDPKACNWKKYKFIVLNSLNQNAKPEGPEQAELGRLSPRAYTAPPACQPPMEPENLDLQSPTKLSASGEDSTIPQASRLNNIVNRSMTGSPRSSSESHSPLYMHPPKCTSCGSQSPQHAEMCLHTAGPTFPEEMGETQSEYSDSSCENGAFFCNECDCRFSEEASLKRHTLQTHSDKPYKCDRCQASFRYKGNLASHKTVHTGEKPYRCNICGAQFNRPANLKTHTRIHSGEKPYKCETCGARFVQVAHLRAHVLIHTGEKPYPCEICGTRFRHLQTLKSHLRIHTGEKPYHCEKCNLHFRHKSQLRLHLRQKHGAITNTKVQYRVSATDLPPELPKAC

SEQ ID NO: 467 - protein, 362 aa, Homo sapiens
  HLA-F HLA class I histocompatibility antigen, alpha chain F Accession No. P30511
MAPRSLLLLLSGALALTDTWAGSHSLRYFSTAVSRPGRGEPRYIAVEYVDDTQFLRFDSDAAIPRMEPREPWVEQEGPQYWEWTTGYAKANAQTDRVALRNLLRRYNQSEAGSHTLQGMNGCDMGPDGRLLRGYHQHAYDGKDYISLNEDLRSWTAADTVAQITQRFYEAEEYAEEFRTYLEGECLELLRRYLENGKETLQRADPPKAHVAHHPISDHEATLRCWALGFYPAEITLTWQRDGEEQTQDTELVETRPAGDGTFQKWAAVVVPSGEEQRYTCHVQHEGLPQPLILRWEQSPQPTIPIVGIVAGLVVLGAVVTGAVVAAVMWRKKSSDRNRGSYSQAAVTDSAQGSGVSLTANKV

SEQ ID NO: 468 - protein, 362 aa, Homo sapiens [sequence omitted]

SEQ ID NO: 469 - protein, 362 aa, Homo sapiens; identical to SEQ ID NO: 467
  HLA class I histocompatibility antigen, alpha chain F precursor Accession No. P30511

SEQ ID NO: 470 - protein, 575 aa, Homo sapiens
  BAG3 BCL-2 associated anthanogene 3 Accession No. O95817
MSAATHSPMMQVASGNGDRDPLPPGWEIKIDPQTGWPFFVDHNSRTTTWNDPRVPSEGPKETPSSANGPSREGSRLPPAREGHPVYPQLRPGYIPIPVLHEGAENRQVHPFHVYPQPGMQRFRTEAAAAAPQRSQSPLRGMPETTQPDKQCGQVAAAAAAQPPASHGPERSQSPAASDCSSSSSSASLPSSGRSSLGSHQLPRGYISIPVIHEQNVTRPAAQPSFHQAQKTHYPAQQGEYQTHQPVYHKIQGDDWEPRPLRAASPFRSSVQGASSREGSPARSSTPLHSPSPIRVHTVVDRPQQPMTHRETAPVSQPENKPESKPGPVGPELPPGHIPIQVIRKEVDSKPVSQKPPPPSEKVEVKVPPAPVPCPPPSPGPSAVPSSPKSVATEERAAPSTAPAEATPPKPGEAEAPPKHPGVLKVEAILEKVQGLEQAVDNFEGKKTDKKYLMIEEYLTKELLALDSVDPEGRADVRQARRDGVRKVQTILEKLEQKAIDVPGQVQVYELQPSNLEADQPLQAIMEMGAVAADKGKKNAGNAEDPHTETQQPEATAAATSNPSSMTDTPGNPAAP

SEQ ID NO: 471 - protein, 261 aa, Homo sapiens
  HAL-DMA major histocompatibility complex, class II, DM alpha Accession No. P28067
MGHEQNQGAALLQMLPLLWLLPHSWAVPEAPTPMWPDDLQNHTFLHTVYCQDGSPSVGLSEAYDEDQLFFFDFSQNTRVPRLPEFADWAQEQGDAPAILFDKEFCEWMIQQIGPKLDGKIPVSRGFPIAEVFTLKPLEFGKPNTLVCFVSNLFPPMLTVNWHDHSVPVEGFGPTFVSAVDGLSFQAFSYLNFTPEPSDIFSCIVTHEIDRYTAIAYWVPRNALPSDLLENVLCGVAFGLGVLGIIVGIVLIIYFRKPCSGD

SEQ ID NO: 472 - protein, 177 aa, Homo sapiens
  TRBC1 T-cell receptor beta chain constant 1 Accession No. P01850
EDLNKVFPPEVAVFEPSEAEISHTQKATLVCLATGFFPDHVELSWWVNGKEVHSGVSTDPQPLKEQPALNDSRYCLSSRLRVSATFWQNPRNHFRCQVQFYGLSENDEWTQDRAKPVTQIVSAEAWGRADCGFTSVSYQQGVLSATILYEILLGKATLYAVLVSALVLMAMVKRKDF

SEQ ID NO: 473 - protein, 266 aa, Homo sapiens
  HLA-DRB major histocompatibility complex, class II, DR beta 4 Accession No. O78O42
MVCLKLPGGSCMAALTVTLTVLSSPLALAGDTQPRFLEQAKCECHFLNGTERVWNLIRYIYNQEEYARYNSDLGEYQAVTELGRPDAEYWNSQKDLLERRRAEVDTYCRYNYGVVESFTVQRRVQPKVTVYPSKTQPLQHHNLLVCSVNGFYPGSIEVRWFRNGQEEKAGVVSTGLIQNGDWTFQTLVMLETVPRSGEVYTCQVEHPSMMSPLTVQWSARSESAQSKMLSGVGGFVLGLLFLGTGLFIYFRNQKGHSGLQPTGLLS

SEQ ID NO: 474 - protein, 423 aa, Mus musculus
  Igtp Interferon gamma induced GTPase Accession No. Q811M6
MDLVTKLPQNIWKTFTLFINMANYLKRLISPWSKSMTAGESLYSSQNSSSPEVIEDIGKAVTEGNLQKVIGIVKDEIQSKSRYRVKIAVTGDSGNGMSSFINALRFIGHEEEDSAPTGVVRTTKKPACYSSDSHFPYVELWDLPGLGATAQSVESYLEEMQISTYHLIIIVASEQFSSNHVKLAITMQRMRKRFYVVWTKLDRDLSTSTFPEPQLLQSIQRNIRENLQQAQVRDPPLFLISCFSPSFHDFPELRNTLQKDIFSIRYRDPLEIISQVCDKCISNKAFSLKEDQMLMKDLEAAVSSEDDTANLERGLQTYQKVFGVDDGSLQQVARSTGRLEMGSRALQFQDLIKMDRRLELMMCFAVNKFLRVLESSWWYGLWNVVTRYFRHQRHKLVIEIVAENTKTSLRKALKDSVLPPEIH

SEQ ID NO: 475 - protein, 420 aa, Mus musculus
  Ifi47 Interferon gamma inducible protein 47 Accession No. Q61635
MDQFISAFLKGASENSFQQLAKEFLPQYSALISKAGGMLSPETLTGIHKALQEGNLSDVMIQIQKAISAAENAILEVAVIGQSGTGKSSFINALRGLGHEADESADVGTVETTMCKTPYQHPKYPKVIFWDLPGTGTPNFHADAYLDQVGFANYDFFIIISSSRFSLNDALLAQKIKDAGKKFYFVRTKVDSDLYNEQKAKPIAFKKEKVLQQIRDYCVTNLIKTGVTEPCIFLISNLDLGAFDFPKLEETLLKELPGHKRHMFALLLPNISDASIELKKHFLREKIWLEALKSAAVSFIPFMTFFKGFDLPEQEQCLKDYRSYFGLDDQSIKEIAEKLGAPLADIKGELKCLDFWSLVKDNSIIAQATSAAEAFCAVKGGPESSAFQALKVYYRRTQFLNIVVDDAKHLLRKIETVNVA

SEQ ID NO: 476 - protein, 435 aa, Mus musculus
  Iigp2 Interferon inducible GTPase 2 Accession No.Q58E63
MEEAVESPEVKEFEYFSDAVFIPKDGNTLSVGVIKRIETAVKEGEIVKVVSIVKEIIQNVSRNKIKIAVTGDSGNGMSSFINALRLVGHEEKDSAPTGVVRTTQKPTCYFSSHFPYVELWDLPGLGATAQSVESYLEEMQISTYDLIIIVASEQFSSNHVKLAITMQRMRKRFYVVWTKLDRDLSTSTFPEPQLLQSIQKNIRDSLQKEKVKEHPMFLVSVFKPESHDFPKLRETLQKDLPVIKYHGLVETLYQVCEKTVNERVEFIKKSIDEDNLHTDFGISDPGNAIEIRKAFQKTFGLDDISLHLVSLEMKNKHFNTSMESQETQRYQQDDWVLARLYRTGTRVGSIGFDYMKCCFSSHHSRCKQQKDILDETAAKAKEVLLKNPETLHSSSLGRFRQLESSPQPCTPCVPPVEITPLSPTPWGPSSLRLLG

SEQ ID NO: 477 - protein, 640 aa, Mus musculus
  Ifi204 Interferon activated gene 204 Accession No.P15092
MVNEYKRIVLLRGLECINKHYFSLFKSLLARDLNLERDNQEQYTTIQIANMMEEKFPADSGLGKLIEFCEEVPALRKRAEILKKERSEVTGETSLEKNGQEAGPATPTSTTSHMLASERGETSATQEETSTAQAGTSTAQARTSTAQARTSTAQARTSTAQARTSTAQEGTSTAQKRKSMREEETGVKKSKAAKEPDQPPCCEEPTAMCQSPILHSSSSASSNIPSAKNQKSQPQNQNIPRGAVLHSEPLTVMVLTATDPFEYESPEHEVKNMLHATVATVSQYFHVKVFNINLKEKFTKKNFIIISNYFESKGILEINETSSVLEAAPDQMIEVPNSIIRNANASPKICDIQKGTSGAVFYGVFTLHKKTVNRKNTIYEIKDGSGSIEVVGSGKWHNINCKEGDKLHLFCFHLKTIDRQPKLVCGEHSFIKISKRGNVPKEPAKEEDHHHGPKQVMVLKVTEPFTYDLKEDKRMFHATVATETEFFRVKVFDTALKSKFIPRNIIAISDYFGCNGFLEIYRASCVSDVNVNPTMVISNTLRQRANATPKISYLFSQARGTFVSGEYLVNKKTERNKFIYYGIGDDTGKMEVVVYGRLTNVRCEPGSKLRLVCFELTSTEDGWQLRSVRHSYMQVINARK

SEQ ID NO: 478 - protein, 413 aa, Mus musculus
  Iigp1 Interferon inducible GTPase 1 Accession No. Q9QZ85
MGQLFSSPKSDENNDLPSSFTGYFKKFNTGRKIISQEILNLIELRMRKGNIQLTNSAISDALKEIDSSVLNVAVTGETGSGKSSFINTLRGIGNEEEGAAKTGVVEVTMERHPYKHPNIPNVVFWDLPGIGSTNFPPNTYLEKMKFYEYDFFIIISATRFKKNDIDIAKAISMMKKEFYFVRTKVDSDITNEADGKPQTFDKEKVLQDIRLNCVNTFRENGIAEPPIFLLSNKNVCHYDFPVLMDKLISDLPIYKRHNFMVSLPNITDSVIEKKRQFLKQRIWLEGFAADLVNIIPSLTFLLDSDLETLKKSMKFYRTVFGVDETSLQRLARDWEIEVDQVEAMIKSPAVFKPTDEETIQERLSRYIQEFCLANGYLLPKNSFLKEIFYLKYYFLDMVTEDAKTLLKEICLRN

SEQ ID NO: 479 - protein, 134 aa, Mus musculus
  LY6F Lymphocyte antigen complex 6, locus F Accession No. P35460
MDSCHTTKSCVLILLVVLLCAERAQGLECYNCLGVSLGIACKSITCPYPDAVCISQQVELIVDSQRRKVKNKLCFPFCPANLENMEILGTTVNVNTSCCKEDLCNAPFSTGGSTWTMTRVLLLNLGSVFLQTLL

SEQ ID NO: 480 - protein, 131 aa, Mus musculus
  LY6C Lymphocyte antigen complex 6, locus C Accession No. P09568
MDSTHATKSCLLILLVALLCAGRAQGLQCYECYGVPIETSCPAVTCRASDGFCIAQNIELIEDSQRRKLKTRQCLSFCPAGVPIKDPNIRERTSCCSEDLCNAAVPTAGSTWTMAGVLLFSLSSVILQTLL

SEQ ID NO: 481 - protein, 134 aa, Mus musculus
  LY6A lymphocyte antigen 6 complex, locus A Accession No. P05533
MDTSHTTKSCLLILLVALLCAERAQGLECYQCYGVPFETSCPSITCPYPDGVCVTQEAAVIVDSQTRKVKNNLCLPICPPNIESMEILGTKVNVKTSCCQEDLCNVAVPNGGSTWTMAGVLLFSLSSVLLQTLL

SEQ ID NO: 482 - protein, 113 aa, Mus musculus
  CTLA2B cytotoxic T lymphocyte-associated protein 2 beta Accession No. P12400
MMSAAPSPDPSLDNEWKEWKTTFAKAYSLDEERHRRLMWEENKKKIEAHNADYERGKTSFYMGLNQFSDLTPEEFRTNCCGSSMCRGEMAPDLPEYEDLGKNSYLTPGRAQPE

SEQ ID NO: 483 - DNA, 760 bp, Homo sapiens
  Human MCP-1 mRNA Accession No. NM_002982
gaggaaccgagaggctgagactaacccagaaacatccaattctcaaactgaagctcgcactctcgcctccagcatgaaagtctctgccgcccttctgtgcctgctgctcatagcagccaccttcattccccaagggctcgctcagccagatgcaatcaatgccccagtcacctgctgttataacttcaccaataggaagatctcagtgcagaggctcgcgagctatagaagaatcaccagcagcaagtgtcccaaagaagctgtgatcttcaagaccattgtggccaaggagatctgtgctgaccccaagcagaagtgggttcaggattccatggaccacctggacaagcaaacccaaactccgaagacttgaacactcactccacaacccaagaatctgcagctaacttattttcccctagctttccccagacaccctgttttattttattataatgaattttgtttgttgatgtgaaacattatgccttaagtaatgttaattcttatttaagttattgatgttttaagtttatctttcatggtactagtgttttttagatacagagacttggggaaattgcttttcctcttgaaccacagttctacccctgggatgttttgagggtctttgcaagaatcattaatacaaagaattttttttaacattccaatgcattgctaaaatattattgtggaaatgaatattttgtaactattacaccaaataaatatatttttgtacaaaaaaaaaaaaaaa

SEQ ID NO: 484 - DNA, 1184 bp, Homo sapiens
  Human IP-10 Accession No. NM_001565
gggggagacattcctcaattgcttagacatattctgagcctacagcagaggaacctccagtctcagcaccatgaatcaaactgccattctgatttgctgccttatctttctgactctaagtggcattcaaggagtacctctctctagaactgtacgctgtacctgcatcagcattagtaatcaacctgttaatccaaggtctttagaaaaacttgaaattattcctgcaagccaattttgtccacgtgttgagatcattgctacaatgaaaaagaagggtgagaagagatgtctgaatccagaatcgaaggccatcaagaatttactgaaagcagttagcaaggaaaggtctaaaagatctccttaaaaccagaggggagcaaaatcgatgcagtgcttccaaggatggaccacacagaggctgcctctcccatcacttccctacatggagtatatgtcaagccataattgttcttagtttgcagttacactaaaaggtgaccaatgatggtcaccaaatcagctgctactactcctgtaggaaggttaatgttcatcatcctaagctattcagtaataactctaccctggcactataatgtaagctctactgaggtgctatgttcttagtggatgttctgaccctgcttcaaatatttccctcacctttcccatcttccaagggtactaaggaatctttctgctttggggtttatcagaattctcagaatctcaaataactaaaaggtatgcaatcaaatctgctttttaaagaatgctctttacttcatggacttccactgccatcctcccaaggggcccaaattctttcagtggctacctacatacaattccaaacacatacaggaaggtagaaatatctgaaaatgtatgtgtaagtattcttatttaatgaaagactgtacaaagtagaagtcttagatgtatatatttcctatattgttttcagtgtacatggaataacatgtaattaagtactatgtatcaatgagtaacaggaaaattttaaaaatacagatagatatatgctctgcatgttacataagataaatgtgctgaatggttttcaaaataaaaatgaggtactctcctggaaatattaagaaagactatctaaatgttgaaagatcaaaaggttaataaagtaattataactaaaaaaa

SEQ ID NO: 485 - protein, 98 aa, Homo sapiens
  Human IP-10 Protein Accession No. P02778
MNQTAILICCLIFLTLSGIQGVPLSRTVRCTCISISNQPVNPRSLEKLEIIPASQFCPRVEIIATMKKKGEKRCLNPESKAIKNLLKAVSKERSKRSP

SEQ ID NO: 486 - protein, 340 aa, Homo sapiens
  Immunoglobulin A heavy chain IGA2 H chain
ASPTSPKVFPLSLDSTPQDGNVVVACLVQGFFPQEPLSVTWSESGQNVTARNFPPSQDASGDLYTTSSQLTLPATQCPDGKSVTCHVKHYTNSSQDVTVPCRVPPPPPCCHPRLSLHRPALEDLLLGSEANLTCTLTGLRDASGATFTWTPSSGKSAVQGPPERDLCGCYSVSSVLPGCAQPWNHGETFTCTAAHPELKTPLTANITKSGNTFRPEVHLLPPPSEELALNELVTLTCLARGFSPKDVLVRWLQGSQELPREKYLTWASRQEPSQGTTTFAVTSILRVAAEDWKKGDTFSCMVGHEALPLAFTQKTIDRLAGKPTHVNVSVVMAEVDGTCY

1. A method for predicting efficacy of viral therapy for a tumor, comprising:
determining a replication indicator indicative of the level or amount of viral replication within a predetermined period of time or as a function of time after introduction of a therapeutic virus into tumor cells; and
determining if replication is delayed, wherein if replication is not delayed, selecting the virus as a candidate therapeutic virus for treatment of the tumor in a subject.

2. The method of claim 1, wherein delayed replication is assessed by:
infecting a cell culture with a therapeutic virus, wherein the cell culture comprises cells from a tumor;
after a predetermined time, determining a replication indicator of replication of the virus in the culture; and
based on the value of the replication indicator, predicting a therapeutic efficacy of the virus against the tumor.

3. The method of claim 1, wherein the cells are tissue culture cells or cells from a tumor biopsy or body fluid containing tumor cells.

4. The method of claim 1, wherein the virus is an oncolytic virus.

5. The method of claim 1, wherein the virus is a vaccinia virus.

6. The method of claim 1, wherein the virus is LIVP.

7. The methods of claim 1, wherein the virus is GLV-1h68.

8. The method of claim 2, wherein the replication indicator is compared to a standard indicative of delayed replication or non-delayed replication.

9. The method of claim 8, wherein the standard is pre-determined.

10. The method of claim 9, wherein the replication indicator is compared to a database of predetermined values for cell types to determine whether the replication indicator has a value indicative of non-delayed replication.

11. The method of claim 1, wherein the tumor cell is selected as responsive to virus therapy by:
obtaining a first set of values, each of the first set of values corresponding to a first parameter indicative of in vivo therapeutic effect of a virus on a cancerous cell line;
obtaining a second set of values, each of the second set of values corresponding to a second parameter indicative of a replication property of the virus in the cell line; and
categorizing the cancerous cell lines into two or more groups based at least in part on the first and second sets of values, the two or more groups representative of likely responses of respective cell lines to the virus.

12. The method of claim 1, wherein the period comprises a range of about zero to 10 days, about zero to 5 days, about zero to 2 days, or about zero to 1 day.

13. The method of claim 12, wherein the period comprises about or less than 24 hours or 24 hours.

14. The method of claim 1, wherein the replication indicator is from among one or more of:
(i) an increase in expression of a viral gene or a heterologous gene encoded by the virus, wherein an increase in expression is indicative that the tumor cells are responsive to virus therapy;
(ii) a decrease in expression of a housekeeping gene expressed in the tumor upon viral expression, wherein a decrease in expression is indicative that the tumor cells are responsive to virus therapy; or
(iii) a change in expression of a gene expressed by the tumor cells, wherein a change in expression is indicative that the tumor cells are responsive to virus therapy

15. The method of claim 14, wherein an increase in gene expression of one or more genes encoding a protein selected from among IL-18 (Interleukin-18), MCP-5 (Monocyte Chemoattractant Protein-5; CCL12), IL-11 (Interleukin-11), MCP-1 (Monocyte Chemoattractant Protein-1), MPO (Myeloperoxidase), Apo A1 (Apolipoprotein A1), TIMP-1 (Tissue Inhibitor of Metalloproteinase Type-1), CRP (C Reactive Protein), Fibrinogen, MMP-9 (Matrix Metalloproteinase-9), Eotaxin (CCL11), GCP-2 (Granulocyte Chemotactic Protein-2; CXCL6), IL-6 (Interleukin-6), Tissue Factor (TF), SAP (Serum Amyloid P), FGF-basic (Fibroblast Growth Factor-basic), MCP-3 (Monocyte Chemoattractant Protein-3; CCL7), IP-10 (CXCL 10), MIP-2, Thrombopoetin, Cancer antigen 125, CD40, CD40 ligand, ENA-78, Ferritin, IL-12p40, IL-12p70, IL-16, MMP-2, PAI-1, TNF RII, TNF-beta and VCAM-1 indicates that the tumor cells are responsive to virus therapy.

16. The method of claim 15, wherein an increase in gene expression of one or more genes encoding a protein selected from among MIP-1beta (Macrophage Inflammatory Protein-1beta), MDC (Macrophage-Derived Chemokine; CCL22), MIP-1alpha (Macrophage Inflammatory Protein-1alpha; CCL3), KC/GROalpha (Melanoma Growth Stimulatory Activity Protein), VEGF (Vascular Endothelial Cell Growth Factor), Endothelin-1, MIP-3 beta (Macrophage Inflammatory Protein-3 beta; Exodus-3 or ELC), Beta-2 microglobulin, IL-5 (Interleukin-5), IL-1 alpha (Interleukin-1 alpha), EGF (Epidermal Growth Factor), Lymphotactin (XCL1), GM-CSF (Granulocyte Macrophage-Colony Stimulating Factor), MIP-1gamma (Macrophage Inflammatory Protein-1 gamma; CCL4), IL-1beta (Interleukin-1 beta), Brain-derived neutrophic factor, Cancer antigen 19-9; Carcinoembryonic antigen, C reactive protein, EGF, Fatty acid binding protein, Factor VII, Growth hormone, IL-1 alpha, IL-1 beta, IL-1 ra, IL-7, IL-8, MDC, Prostatic acid phosphatase, Prostate specific antigen, free, Stem cell factor, Tissue factor, TNF-alpha, VEGF and Von Willebrand factor, indicates that the tumor cells are not responsive to virus therapy.

17. The method of claim 14, wherein the expression of two or more genes is assessed.

18. The method of claim 14, wherein gene expression is assessed on an array.

19. The method of claim 1, further comprising adjusting the multiplicity of infection to obtain an improved replication indicator from infected tumor cells.

20. The method of claim 1, further comprising,
modifying the virus to include a gene that encodes a protein whose expression is increased in responders compared to non-responders or encodes a gene product that reduces expression of a protein whose level of expression is increased in non-responders compared to responders, wherein a responder is a tumor that is susceptible to treatment with the virus and a non-responder is a tumor that is resistant to treatment with the virus.

21. A method for increasing the therapeutic efficacy of a therapeutic virus, comprising:
including in the virus nucleic acid that encodes a protein whose expression is increased in responders compared to non-responders or encodes a gene product that reduces expression of a protein whose level of expression is increased in non-responders compared to responders, wherein a responder is a tumor that is susceptible to treatment with the virus and a non-responder is a tumor that is resistant to treatment with the virus.

22. A method of viral therapy, comprising:
administering a therapeutic virus to a subject, wherein the virus encodes a protein whose expression is increased in responders compared to non-responders or encodes a gene product that reduces expression of a protein whose level of expression is increased in non-responders compared to responders, wherein a responder is a tumor that is susceptible to treatment with the virus and a non-responder is a tumor that is resistant to treatment with the virus.

23. A method of treating a subject with a non-responder tumor with a therapeutic virus, comprising:
modifying the virus to encode a protein whose expression is increased in responders compared to non-responders or encodes a gene product that reduces expression of a protein whose level of expression is increased in non-responders compared to responders, wherein a responder is a tumor that is susceptible to treatment with the virus and a non-responder is a tumor that is resistant to treatment with the virus; and
administering the modified virus.

24. The method of claim 21, wherein the gene product comprises an antisense nucleic acid or ribozyme.

25. A therapeutic virus, wherein the virus encodes a protein whose expression is increased in responders compared to non-responders or encodes a gene product that reduces expression of a protein whose level of expression is increased in non-responders compared to responders, wherein a responder is a tumor that is susceptible to treatment with the virus and a non-responder is a tumor that is resistant to treatment with the virus.

26. The virus of claim 25, wherein the gene product comprises an antisense nucleic acid or ribozyme.

27. The virus of claim 25, wherein the protein is selected from among TIMP-1, TIMP-2, TIMP-3, MCP-1, and IP-10.

28. The virus of claim 25, wherein the virus is a vaccinia virus.

29. The virus of claim 28, wherein the virus is an LIVP virus.

30. The virus of claim 29, wherein the virus is GLV-1h103, GLV-1h119, GLV-1h120 or GLV-1h121.

31. A combination, comprising
an array of cell cultures, wherein the cell cultures comprise tumor cells;
and an oncolytic virus.

32. A pharmaceutical composition comprising a virus of claim 25 in a pharmaceutically acceptable carrier.

33. The pharmaceutical composition of claim 32, further comprising a therapeutic agent.

34. The pharmaceutical composition of claim 33, wherein the therapeutic agent is an anti-cancer agent.

35. A method for predicting efficacy of viral therapy for a tumor, comprising:
determining the level of expression of at least one marker that is increased or decreased in a responder compared to a non-responder in the absence of virus treatment, wherein a responder is a tumor that is susceptible to treatment with the virus and a non-responder is a tumor that is not susceptible to treatment with the virus; and
based on the level of expression of the marker, predicting a therapeutic effect of the virus against the tumor.

36. The method of claim 20, wherein the protein is selected from among Beta-2 Microglobulin, Brain-Derived Neurotrophic Factor, Cancer Antigen 19-9, Carcinoembryonic Antigen, C Reactive Protein, EGF, Fatty Acid Binding Protein, Factor VII, Growth Hormone, GM-CSF, IL-1alpha, IL-1beta, IL-1ra, IL-7, IL-8, Prostatic Acid Phosphatase, Prostate Specific Antigen, Stem Cell Factor, TNF-alpha and VEGF.

37. The method of claim 25, wherein the protein is selected from among Beta-2 Microglobulin, Brain-Derived Neurotrophic Factor, Cancer Antigen 19-9, Carcinoembryonic Antigen, C Reactive Protein, EGF, Fatty Acid Binding Protein, Factor VII, Growth Hormone, GM-CSF, IL-1alpha, IL-1beta, IL-1ra, IL-7, IL-8, Prostatic Acid Phosphatase, Prostate Specific Antigen, Stem Cell Factor, TNF-alpha and VEGF.

38. The method of claim 35, wherein the marker that is increased in non-responders compared to responders is selected from among Beta-2 Microglobulin, Brain-Derived Neurotrophic Factor, Cancer Antigen 19-9, Carcinoembryonic Antigen, C Reactive Protein, EGF, Fatty Acid Binding Protein, Factor VII, Growth Hormone, GM-CSF, IL-1 alpha, IL-1 beta, IL-1 ra, IL-7, IL-8, Prostatic Acid Phosphatase, Prostate Specific Antigen, Stem Cell Factor, TNF-alpha, and VEGF.

39. A method of assessing whether a subject will respond favorably or poorly to a particular viral therapy comprising:
contacting a sample from the subject with a therapeutic virus;
determining whether the level of expression of at least one marker is altered in response to the virus, wherein the marker is a marker that is altered in a responder compared to a non-responder; and
based on whether the level of expression of the marker is altered, predicting whether a subject is likely to respond favorably or poorly to viral therapy.

40. The method of claim 39, wherein the determining step comprises comparing the level of expression of the marker in the sample which has been contacted with the virus to the level of expression of the marker in a sample which has not been contacted with the virus.

41. The method of claim 39, wherein the determining step comprises culturing the sample contacted with the virus in vitro.

42. The method of claim 39, wherein the sample comprises tumor cells.

43. The method of claim 39, wherein the level of expression of the at least one marker is indicative of a favorable or a poor response to viral therapy.

44. The method of claim 39, wherein the at least one marker is selected from among IL-18, MCP-5, IL-11, MCP-1, MPO, Apo A1, TIMP-1 (Tissue Inhibitor of Metalloproteinase Type-1), CRP (C Reactive Protein), Fibrinogen, MMP-9 (Matrix Metalloproteinase-9), Eotaxin (CCL11), GCP-2 (Granulocyte Chemotactic Protein-2; CXCL6), IL-6 (Interleukin-6), Tissue Factor (TF), SAP (Serum Amyloid P), FGF-basic (Fibroblast Growth Factor-basic), MCP-3 (Monocyte Chemoattractant Protein-3; CCL7), IP-10 (CXCL 10), MIP-2, Thrombopoetin, Cancer antigen 125, CD40, CD40 ligand, ENA-78, Ferritin, IL-12p40, IL-12p70, IL-16, MMP-2, PAI-1, TNF RII, TNF-beta and VCAM-1, MIP-1beta (Macrophage Inflammatory Protein-1beta), MDC (Macrophage-Derived Chemokine; CCL22), MIP-1alpha (Macrophage Inflammatory Protein-1alpha; CCL3), KC/GROalpha (Melanoma Growth Stimulatory Activity Protein), VEGF (Vascular Endothelial Cell Growth Factor), Endothelin-1, MIP-3 beta (Macrophage Inflammatory Protein-3 beta; Exodus-3 or ELC), Beta-2 microglobulin, IL-5 (Interleukin-5), IL-1 alpha (Interleukin-1 alpha), EGF (Epidermal Growth Factor), Lymphotactin (XCL1), GM-CSF (Granulocyte Macrophage-Colony Stimulating Factor), MIP-1gamma (Macrophage Inflammatory Protein-1gamma; CCL4), IL-1beta (Interleukin-1 beta), Brain-derived neutrophic factor, Cancer antigen 19-9, Carcinoembryonic antigen, C reactive protein, EGF, Fatty acid binding protein, Factor VII, Growth hormone, IL-1 alpha, IL-1 beta, IL-1 ra, IL-7, IL-8, MDC, Prostatic acid phosphatase, Prostate specific antigen, Stem cell factor, Tissue factor, TNF-alpha, VEGF, Von Willebrand factor, IgA (Immunoglobulin A), Haptoglobin, MIP-2 (Macrophage Inflammatory Protein-2), IL-17 (Interleukin-17), SGOT (Serum Glutamic-Oxaloacetic Transaminase), IP-10 (Inducible Protein-10), IL-10, FGF-9 (Fibroblast Growth Factor-9), M-CSF (Macrophage-Colony Stimulating Factor), IL-4 (Interleukin-4), IL-3 (Interleukin-3), TPO (Thrombopoietin), SCF (Stem Cell Factor), LIF (Leukemia Inhibitory Factor), IL-2 (Interleukin-2), VCAM-1 (Vascular Cell Adhesion Molecule-1; CD106) and TNF alpha and OSM (Oncostatin M).

45. The method of claim 39, wherein the determining step comprises determining whether the expression of a plurality of markers is altered in response to the virus.

46. The method of claim 39, wherein the determining step comprises determining whether the level of expression of at least 5 or more, at least 10 or more, at least 15 or more markers are altered in response to the virus, wherein the markers are selected from among IL-18 (Interleukin-18), MCP-5 (Monocyte Chemoattractant Protein-5; CCL12), IL-11 (Interleukin-11), MCP-1 (Monocyte Chemoattractant Protein-1), MPO (Myeloperoxidase), Apo A1 (Apolipoprotein A1), TIMP-1 (Tissue Inhibitor of Metalloproteinase Type-1), CRP (C Reactive Protein), Fibrinogen, MMP-9 (Matrix Metalloproteinase-9), Eotaxin (CCL11), GCP-2 (Granulocyte Chemotactic Protein-2; CXCL6), IL-6 (Interleukin-6), Tissue Factor (TF), SAP (Serum Amyloid P), FGF-basic (Fibroblast Growth Factor-basic), MCP-3 (Monocyte Chemoattractant Protein-3; CCL7), IP-10 (CXCL 10), MIP-2, Thrombopoetin, Cancer antigen 125, CD40, CD40 ligand, ENA-78, Ferritin, IL-12p40, IL-12p70, IL-16, MMP-2, PAI-1, TNF RII, TNF-beta and VCAM-1, MIP-1beta (Macrophage Inflammatory Protein-1beta), MDC (Macrophage-Derived Chemokine; CCL22), MIP-1alpha (Macrophage Inflammatory Protein-1alpha; CCL3), KC/GROalpha (Melanoma Growth Stimulatory Activity Protein), VEGF (Vascular Endothelial Cell Growth Factor), Endothelin-1, MIP-3 beta (Macrophage Inflammatory Protein-3 beta; Exodus-3 or ELC), Beta-2 microglobulin, IL-5 (Interleukin-5), IL-1 alpha (Interleukin-1 alpha), EGF (Epidermal Growth Factor), Lymphotactin (XCL1), GM-CSF (Granulocyte Macrophage-Colony Stimulating Factor), MIP-1gamma (Macrophage Inflammatory Protein-1gamma; CCL4), IL-1beta (Interleukin-1 beta), Brain-derived neutrophic factor, Cancer antigen 19-9, Carcinoembryonic antigen, C reactive protein, EGF, Fatty acid binding protein, Factor VII, Growth hormone, IL-1 alpha, IL-1 beta, IL-1 ra, IL-7, IL-8, MDC, Prostatic acid phosphatase, Prostate specific antigen, Stem cell factor, Tissue factor, TNF-alpha, VEGF, Von Willebrand factor, IgA (Immunoglobulin A), Haptoglobin, MIP-2 (Macrophage Inflammatory Protein-2), IL-17 (Interleukin-17), SGOT (Serum Glutamic-Oxaloacetic Transaminase), IP-10 (Inducible Protein-10), IL-10, FGF-9 (Fibroblast Growth Factor-9), M-CSF (Macrophage-Colony Stimulating Factor), IL-4 (Interleukin-4), IL-3 (Interleukin-3), TPO (Thrombopoietin), SCF (Stem Cell Factor), LIF (Leukemia Inhibitory Factor), IL-2 (Interleukin-2), VCAM-1 (Vascular Cell Adhesion Molecule-1; CD106) and TNF alpha and OSM (Oncostatin M).

47. The method of claim 39, wherein the determining step comprises determining whether the level of expression of at least one marker is increased in response to the virus, wherein the at least one marker is selected from among IL-18 (Interleukin-18), MCP-5 (Monocyte Chemoattractant Protein-5; CCL12), IL-11 (Interleukin-11), MCP-1 (Monocyte Chemoattractant Protein-1), MPO (Myeloperoxidase), Apo A1 (Apolipoprotein A1), TIMP-1 (Tissue Inhibitor of Metalloproteinase Type-1), CRP (C Reactive Protein), Fibrinogen, MMP-9 (Matrix Metalloproteinase-9), Eotaxin (CCL11), GCP-2 (Granulocyte Chemotactic Protein-2; CXCL6), IL-6 (Interleukin-6), Tissue Factor (TF), SAP (Serum Amyloid P), FGF-basic (Fibroblast Growth Factor-basic), MCP-3 (Monocyte Chemoattractant Protein-3; CCL7), IP-10 (CXCL 10), MIP-2, Thrombopoetin, Cancer antigen 125, CD40, CD40 ligand, ENA-78, Ferritin, IL-12p40, IL-12p70, IL-16, MMP-2, PAI-1, TNF RII, TNF-beta and VCAM-1.

48. The method of claim 39, wherein the determining step comprises determining whether the level of expression of at least one marker is decreased in response to the virus, wherein the at least one marker is selected from among MIP-1beta (Macrophage Inflammatory Protein-1beta), MDC (Macrophage-Derived Chemokine; CCL22), MIP-1alpha (Macrophage Inflammatory Protein-1alpha; CCL3), KC/GROalpha (Melanoma Growth Stimulatory Activity Protein), VEGF (Vascular Endothelial Cell Growth Factor), Endothelin-1, MIP-3 beta (Macrophage Inflammatory Protein-3 beta; Exodus-3 or ELC), Beta-2 microglobulin, IL-5 (Interleukin-5), IL-1 alpha (Interleukin-1 alpha), EGF (Epidermal Growth Factor), Lymphotactin (XCL1), GM-CSF (Granulocyte Macrophage-Colony Stimulating Factor), MIP-1gamma (Macrophage Inflammatory Protein-1 gamma; CCL4), IL-1beta (Interleukin-1 beta), Brain-derived neutrophic factor, Cancer antigen 19-9, Carcinoembryonic antigen, C reactive protein, EGF, Fatty acid binding protein, Factor VII, Growth hormone, IL-1 alpha, IL-1 beta, IL-1 ra, IL-7, IL-8, MDC, Prostatic acid phosphatase, Prostate specific antigen, free, Stem cell factor, Tissue factor, TNF-alpha, VEGF and Von Willebrand factor.

49. The method of claim 39, wherein the therapeutic virus is GLV-1h68.

50. A method of assessing whether a candidate virus will be effective in viral therapy comprising determining whether the candidate virus alters the level of expression of at least one marker in a cell contacted with the candidate virus, wherein the cell is known to be responsive to viral therapy vectors; and
based on whether the level of expression of the marker is altered, predicting whether candidate virus will be effective for viral therapy.

51. The method of claim 50, wherein the determining step comprises comparing the level of expression of the marker in the cell contacted with the candidate virus to the level of expression of the marker in a cell not contacted with the candidate virus.

52. The method of claim 50, wherein the determining step comprises culturing the cell contacted with the virus in vitro.

53. The method of claim 50, wherein the determining step comprises culturing the cell contacted with the virus in vivo.

54. The method of claim 50, wherein the marker is selected from among IL-18 (Interleukin-18), MCP-5 (Monocyte Chemoattractant Protein-5; CCL12), IL-11 (Interleukin-11), MCP-1 (Monocyte Chemoattractant Protein-1), MPO (Myeloperoxidase), Apo A1 (Apolipoprotein A1), TIMP-1 (Tissue Inhibitor of Metalloproteinase Type-1), CRP (C Reactive Protein), Fibrinogen, MMP-9 (Matrix Metalloproteinase-9), Eotaxin (CCL11), GCP-2 (Granulocyte Chemotactic Protein-2; CXCL6), IL-6 (Interleukin-6), Tissue Factor (TF), SAP (Serum Amyloid P), FGF-basic (Fibroblast Growth Factor-basic), MCP-3 (Monocyte Chemoattractant Protein-3; CCL7), IP-10 (CXCL 10), MIP-2, Thrombopoetin, Cancer antigen 125, CD40, CD40 ligand, ENA-78, Ferritin, IL-12p40, IL-12p70, IL-16, MMP-2, PAI-1, TNF RII, TNF-beta and VCAM-1, MIP-1beta (Macrophage Inflammatory Protein-1beta), MDC (Macrophage-Derived Chemokine; CCL22), MIP-1alpha (Macrophage Inflammatory Protein-1alpha; CCL3), KC/GROalpha (Melanoma Growth Stimulatory Activity Protein), VEGF (Vascular Endothelial Cell Growth Factor), Endothelin-1, MIP-3 beta (Macrophage Inflammatory Protein-3 beta; Exodus-3 or ELC), Beta-2 microglobulin, IL-5 (Interleukin-5), IL-1 alpha (Interleukin-1 alpha), EGF (Epidermal Growth Factor), Lymphotactin (XCL1), GM-CSF (Granulocyte Macrophage-Colony Stimulating Factor), MIP-1gamma (Macrophage Inflammatory Protein-1 gamma; CCL4), IL-1beta (Interleukin-1 beta), Brain-derived neutrophic factor, Cancer antigen 19-9, Carcinoembryonic antigen, C reactive protein, EGF, Fatty acid binding protein, Factor VII, Growth hormone, IL-1 alpha, IL-1 beta, IL-1 ra, IL-7, IL-8, MDC, Prostatic acid phosphatase, Prostate specific antigen, Stem cell factor, Tissue factor, TNF-alpha, VEGF, Von Willebrand factor, IgA (Immunoglobulin A), Haptoglobin, MIP-2 (Macrophage Inflammatory Protein-2), IL-17 (Interleukin-17), SGOT (Serum Glutamic-Oxaloacetic Transaminase), IP-10 (Inducible Protein-10), IL-10, FGF-9 (Fibroblast Growth Factor-9), M-CSF (Macrophage-Colony Stimulating Factor), IL-4 (Interleukin-4), IL-3 (Interleukin-3), TPO (Thrombopoietin), SCF (Stem Cell Factor), LIF (Leukemia Inhibitory Factor), IL-2 (Interleukin-2), VCAM-1 (Vascular Cell Adhesion Molecule-1; CD106) and TNF alpha and OSM (Oncostatin M).

55. The method of claim 50, wherein the determining step comprises determining whether the level of expression of a plurality of markers is altered in response to the virus.

56. The method of claim 50, wherein the determining step comprises determining whether the level of expression of at least 5 or more, at least 10 or more, or at least 15 or more markers is altered in response to the virus, wherein the markers are selected from among IL-18 (Interleukin-18), MCP-5 (Monocyte Chemoattractant Protein-5; CCL12), IL-1 (Interleukin-11), MCP-1 (Monocyte Chemoattractant Protein-1), MPO (Myeloperoxidase), Apo A1 (Apolipoprotein A1), TIMP-1 (Tissue Inhibitor of Metalloproteinase Type-1), CRP (C Reactive Protein), Fibrinogen, MMP-9 (Matrix Metalloproteinase-9), Eotaxin (CCL11), GCP-2 (Granulocyte Chemotactic Protein-2; CXCL6), IL-6 (Interleukin-6), Tissue Factor (TF), SAP (Serum Amyloid P), FGF-basic (Fibroblast Growth Factor-basic), MCP-3 (Monocyte Chemoattractant Protein-3; CCL7), IP-10 (CXCL 10), MIP-2, Thrombopoetin, Cancer antigen 125, CD40, CD40 ligand, ENA-78, Ferritin, IL-12p40, IL-12p70, IL-16, MMP-2, PAI-1, TNF RII, TNF-beta and VCAM-1, MIP-1beta (Macrophage Inflammatory Protein-1beta), MDC (Macrophage-Derived Chemokine; CCL22), MIP-1alpha (Macrophage Inflammatory Protein-1alpha; CCL3), KC/GROalpha (Melanoma Growth Stimulatory Activity Protein), VEGF (Vascular Endothelial Cell Growth Factor), Endothelin-1, MIP-3 beta (Macrophage Inflammatory Protein-3 beta; Exodus-3 or ELC), Beta-2 microglobulin, IL-5 (Interleukin-5), IL-1 alpha (Interleukin-1 alpha), EGF (Epidermal Growth Factor), Lymphotactin (XCL1), GM-CSF (Granulocyte Macrophage-Colony Stimulating Factor), MIP-1gamma (Macrophage Inflammatory Protein-1gamma; CCL4), IL-1beta (Interleukin-1 beta), Brain-derived neutrophic factor, Cancer antigen 19-9, Carcinoembryonic antigen, C reactive protein, EGF, Fatty acid binding protein, Factor VII, Growth hormone, IL-1 alpha, IL-1 beta, IL-1 ra, IL-7, IL-8, MDC, Prostatic acid phosphatase, Prostate specific antigen, Stem cell factor, Tissue factor, TNF-alpha, VEGF, Von Willebrand factor, IgA (Immunoglobulin A), Haptoglobin, MIP-2 (Macrophage Inflammatory Protein-2), IL-17 (Interleukin-17), SGOT (Serum Glutamic-Oxaloacetic Transaminase), IP-10 (Inducible Protein-10), IL-10, FGF-9 (Fibroblast Growth Factor-9), M-CSF (Macrophage-Colony Stimulating Factor), IL-4 (Interleukin-4), IL-3 (Interleukin-3), TPO (Thrombopoietin), SCF (Stem Cell Factor), LIF (Leukemia Inhibitory Factor), IL-2 (Interleukin-2), VCAM-1 (Vascular Cell Adhesion Molecule-1; CD106) and TNF alpha and OSM (Oncostatin M).

57. The method of claim 50, wherein the determining step comprises determining whether the level of expression of at least one marker is increased in response to the virus, wherein the at least one marker is selected from among IL-18 (Interleukin-18), MCP-5 (Monocyte Chemoattractant Protein-5; CCL12), IL-11 (Interleukin-11), MCP-1 (Monocyte Chemoattractant Protein-1), MPO (Myeloperoxidase), Apo A1 (Apolipoprotein A1), TIMP-1 (Tissue Inhibitor of Metalloproteinase Type-1), CRP (C Reactive Protein), Fibrinogen, MMP-9 (Matrix Metalloproteinase-9), Eotaxin (CCL11), GCP-2 (Granulocyte Chemotactic Protein-2; CXCL6), IL-6 (Interleukin-6), Tissue Factor (TF), SAP (Serum Amyloid P), FGF-basic (Fibroblast Growth Factor-basic), MCP-3 (Monocyte Chemoattractant Protein-3; CCL7), IP-10 (CXCL 10), MIP-2, Thrombopoetin, Cancer antigen 125, CD40, CD40 ligand, ENA-78, Ferritin, IL-12p40, IL-12p70, IL-16, MMP-2, PAI-1, TNF RII, TNF-beta and VCAM-1.

58. The method of claim 50, wherein the determining step comprises determining whether the level of expression of at least one marker is decreased in response to the virus, wherein the at least one marker is selected from among MIP-1beta (Macrophage Inflammatory Protein-1beta), MDC (Macrophage-Derived Chemokine; CCL22), MIP-1alpha (Macrophage Inflammatory Protein-1alpha; CCL3), KC/GROalpha (Melanoma Growth Stimulatory Activity Protein), VEGF (Vascular Endothelial Cell Growth Factor), Endothelin-1, MIP-3 beta (Macrophage Inflammatory Protein-3 beta; Exodus-3 or ELC), Beta-2 microglobulin, IL-5 (Interleukin-5), IL-1 alpha (Interleukin-1 alpha), EGF (Epidermal Growth Factor), Lymphotactin (XCL1), GM-CSF (Granulocyte Macrophage-Colony Stimulating Factor), MIP-1gamma (Macrophage Inflammatory Protein-1 gamma; CCL4), IL-1beta (Interleukin-1 beta), Brain-derived neutrophic factor, Cancer antigen 19-9, Carcinoembryonic antigen, C reactive protein, EGF, Fatty acid binding protein, Factor VII, Growth hormone, IL-1 alpha, IL-1 beta, IL-1 ra, IL-7, IL-8, MDC, Prostatic acid phosphatase, Prostate specific antigen, free, Stem cell factor, Tissue factor, TNF-alpha, VEGF and Von Willebrand factor.

59. The method of claim 50, wherein the therapeutic virus is GLV-1h68.

60. A method of monitoring the progress of viral therapy in a subject comprising determining whether the level of expression of at least one marker is altered in the subject at a plurality of time points; and
based on whether the level of expression of the marker is altered, making an assessment of whether the viral therapy is effective.

61. The method of claim 60, wherein the determining step comprises comparing the level of expression of the marker in a first sample to the level of expression of the marker in at least a second sample obtained from the subject subsequent to the time at which the first sample was obtained.

62. The method of claim 60, wherein one of the time points is prior to or at about the same time as beginning the viral therapy.

63. The method of claim 60, wherein at least one of the time points is during the viral therapy.

64. The method of claim 60, wherein the at least one marker is known to be altered in response to viral therapy in the host.

65. The method of claim 64, wherein the at least one marker is selected from among IL-18 (Interleukin-18), MCP-5 (Monocyte Chemoattractant Protein-5; CCL12), IL-11 (Interleukin-11), MCP-1 (Monocyte Chemoattractant Protein-1), MPO (Myeloperoxidase), Apo A1 (Apolipoprotein A1), TIMP-1 (Tissue Inhibitor of Metalloproteinase Type-1), CRP (C Reactive Protein), Fibrinogen, MMP-9 (Matrix Metalloproteinase-9), Eotaxin (CCL11), GCP-2 (Granulocyte Chemotactic Protein-2; CXCL6), IL-6 (Interleukin-6), Tissue Factor (TF), SAP (Serum Amyloid P), FGF-basic (Fibroblast Growth Factor-basic), MCP-3 (Monocyte Chemoattractant Protein-3; CCL7), IP-10 (CXCL 10), MIP-2, Thrombopoetin, Cancer antigen 125, CD40, CD40 ligand, ENA-78, Ferritin, IL-12p40, IL-12p70, IL-16, MMP-2, PAI-1, TNF RII, TNF-beta and VCAM-1, MIP-1beta (Macrophage Inflammatory Protein-1beta), MDC (Macrophage-Derived Chemokine; CCL22), MIP-1alpha (Macrophage Inflammatory Protein-1alpha; CCL3), KC/GROalpha (Melanoma Growth Stimulatory Activity Protein), VEGF (Vascular Endothelial Cell Growth Factor), Endothelin-1, MIP-3 beta (Macrophage Inflammatory Protein-3 beta; Exodus-3 or ELC), Beta-2 microglobulin, IL-5 (Interleukin-5), IL-1 alpha (Interleukin-1 alpha), EGF (Epidermal Growth Factor), Lymphotactin (XCL1), GM-CSF (Granulocyte Macrophage-Colony Stimulating Factor), MIP-1 gamma (Macrophage Inflammatory Protein-1gamma; CCL4), IL-1beta (Interleukin-1beta), Brain-derived neutrophic factor, Cancer antigen 19-9, Carcinoembryonic antigen, C reactive protein, EGF, Fatty acid binding protein, Factor VII, Growth hormone, IL-1 alpha, IL-1 beta, IL-1 ra, IL-7, IL-8, MDC, Prostatic acid phosphatase, Prostate specific antigen, Stem cell factor, Tissue factor, TNF-alpha, VEGF, Von Willebrand factor, IgA (Immunoglobulin A), Haptoglobin, MIP-2 (Macrophage Inflammatory Protein-2), IL-17 (Interleukin-17), SGOT (Serum Glutamic-Oxaloacetic Transaminase), IP-10 (Inducible Protein-10), IL-10, FGF-9 (Fibroblast Growth Factor-9), M-CSF (Macrophage-Colony Stimulating Factor), IL-4 (Interleukin-4), IL-3 (Interleukin-3), TPO (Thrombopoietin), SCF (Stem Cell Factor), LIF (Leukemia Inhibitory Factor), IL-2 (Interleukin-2), VCAM-1 (Vascular Cell Adhesion Molecule-1; CD106) and TNF alpha and OSM (Oncostatin M).

66. The method of claim 60, wherein the determining step comprises determining whether the level of expression of a plurality of markers is altered in response to the virus.

67. The method of claim 60, wherein the determining step comprises determining whether the level of expression of at least 5 or more, at least 10 or more, or at least 15 or more markers is altered in response to the virus, wherein the markers are selected from among IL-18 (Interleukin-18), MCP-5 (Monocyte Chemoattractant Protein-5; CCL12), IL-11 (Interleukin-11), MCP-1 (Monocyte Chemoattractant Protein-1), MPO (Myeloperoxidase), Apo A1 (Apolipoprotein A1), TIMP-1 (Tissue Inhibitor of Metalloproteinase Type-1), CRP (C Reactive Protein), Fibrinogen, MMP-9 (Matrix Metalloproteinase-9), Eotaxin (CCL11), GCP-2 (Granulocyte Chemotactic Protein-2; CXCL6), IL-6 (Interleukin-6), Tissue Factor (TF), SAP (Serum Amyloid P), FGF-basic (Fibroblast Growth Factor-basic), MCP-3 (Monocyte Chemoattractant Protein-3; CCL7), IP-10 (CXCL 10), MIP-2, Thrombopoetin, Cancer antigen 125, CD40, CD40 ligand, ENA-78, Ferritin, IL-12p40, IL-12p70, IL-16, MMP-2, PAI-1, TNF RII, TNF-beta and VCAM-1, MIP-1beta (Macrophage Inflammatory Protein-1beta), MDC (Macrophage-Derived Chemokine; CCL22), MIP-1alpha (Macrophage Inflammatory Protein-1alpha; CCL3), KC/GROalpha (Melanoma Growth Stimulatory Activity Protein), VEGF (Vascular Endothelial Cell Growth Factor), Endothelin-1, MIP-3 beta (Macrophage Inflammatory Protein-3 beta; Exodus-3 or ELC), Beta-2 microglobulin, IL-5 (Interleukin-5), IL-1 alpha (Interleukin-1 alpha), EGF (Epidermal Growth Factor), Lymphotactin (XCL1), GM-CSF (Granulocyte Macrophage-Colony Stimulating Factor), MIP-1 gamma (Macrophage Inflammatory Protein-1gamma; CCL4), IL-1beta (Interleukin-1 beta), Brain-derived neutrophic factor, Cancer antigen 19-9, Carcinoembryonic antigen, C reactive protein, EGF, Fatty acid binding protein, Factor VII, Growth hormone, IL-1 alpha, IL-1 beta, IL-1 ra, IL-7, IL-8, MDC, Prostatic acid phosphatase, Prostate specific antigen, Stem cell factor, Tissue factor, TNF-alpha, VEGF, Von Willebrand factor, IgA (Immunoglobulin A), Haptoglobin, MIP-2 (Macrophage Inflammatory Protein-2), IL-17 (Interleukin-17), SGOT (Serum Glutamic-Oxaloacetic Transaminase), IP-10 (Inducible Protein-10), IL-10, FGF-9 (Fibroblast Growth Factor-9), M-CSF (Macrophage-Colony Stimulating Factor), IL-4 (Interleukin-4), IL-3 (Interleukin-3), TPO (Thrombopoietin), SCF (Stem Cell Factor), LIF (Leukemia Inhibitory Factor), IL-2 (Interleukin-2), VCAM-1 (Vascular Cell Adhesion Molecule-1; CD106) and TNF alpha and OSM (Oncostatin M).

68. The method of claim 60, wherein the determining step comprises determining whether the level expression of at least one marker is increased in response to the virus, wherein the at least one marker is selected from among IL-18 (Interleukin-18), MCP-5 (Monocyte Chemoattractant Protein-5; CCL12), IL-11 (Interleukin-11), MCP-1 (Monocyte Chemoattractant Protein-1), MPO (Myeloperoxidase), Apo A1 (Apolipoprotein A1), TIMP-1 (Tissue Inhibitor of Metalloproteinase Type-1), CRP (C Reactive Protein), Fibrinogen, MMP-9 (Matrix Metalloproteinase-9), Eotaxin (CCL11), GCP-2 (Granulocyte Chemotactic Protein-2; CXCL6), IL-6 (Interleukin-6), Tissue Factor (TF), SAP (Serum Amyloid P), FGF-basic (Fibroblast Growth Factor-basic), MCP-3 (Monocyte Chemoattractant Protein-3; CCL7), IP-10 (CXCL 10), MIP-2, Thrombopoetin, Cancer antigen 125, CD40, CD40 ligand, ENA-78, Ferritin, IL-12p40, IL-12p70, IL-16, MMP-2, PAI-1, TNF RII, TNF-beta and VCAM-1.

69. The method of claim 60, wherein the determining step comprises determining whether the level expression of at least one marker is decreased in response to the virus, wherein the at least one marker is selected from among MIP-1beta (Macrophage Inflammatory Protein-1beta), MDC (Macrophage-Derived Chemokine; CCL22), MIP-1alpha (Macrophage Inflammatory Protein-1alpha; CCL3), KC/GROalpha (Melanoma Growth Stimulatory Activity Protein), VEGF (Vascular Endothelial Cell Growth Factor), Endothelin-1, MIP-3 beta (Macrophage Inflammatory Protein-3 beta; Exodus-3 or ELC), Beta-2 microglobulin, IL-5 (Interleukin-5), IL-1 alpha (Interleukin-1 alpha), EGF (Epidermal Growth Factor), Lymphotactin (XCL1), GM-CSF (Granulocyte Macrophage-Colony Stimulating Factor), MIP-gamma (Macrophage Inflammatory Protein-1 gamma; CCL4), IL-1beta (Interleukin-1 beta), Brain-derived neutrophic factor, Cancer antigen 19-9, Carcinoembryonic antigen, C reactive protein, EGF, Fatty acid binding protein, Factor VII, Growth hormone, IL-1 alpha, IL-1 beta, IL-1 ra, IL-7, IL-8, MDC, Prostatic acid phosphatase, Prostate specific antigen, free, Stem cell factor, Tissue factor, TNF-alpha, VEGF and Von Willebrand factor.

70. A combination, comprising:
a therapeutic virus of claim 25; and
a reagent to assess expression of at least one marker selected from among IL-18 (Interleukin-18), MCP-5 (Monocyte Chemoattractant Protein-5; CCL12), IL-11 (Interleukin-11), MCP-1 (Monocyte Chemoattractant Protein-1), MPO (Myeloperoxidase), Apo A1 (Apolipoprotein A1), TIMP-1 (Tissue Inhibitor of Metalloproteinase Type-1), CRP (C Reactive Protein), Fibrinogen, MMP-9 (Matrix Metalloproteinase-9), Eotaxin (CCL11), GCP-2 (Granulocyte Chemotactic Protein-2; CXCL6), IL-6 (Interleukin-6), Tissue Factor (TF), SAP (Serum Amyloid P), FGF-basic (Fibroblast Growth Factor-basic), MCP-3 (Monocyte Chemoattractant Protein-3; CCL7), IP-10 (CXCL 10), MIP-2, Thrombopoetin, Cancer antigen 125, CD40, CD40 ligand, ENA-78, Ferritin, IL-12p40, IL-12p70, IL-16, MMP-2, PAI-1, TNF RII, TNF-beta and VCAM-1, MIP-1beta (Macrophage Inflammatory Protein-1beta), MDC (Macrophage-Derived Chemokine; CCL22), MIP-1alpha (Macrophage Inflammatory Protein-1alpha; CCL3), KC/GROalpha (Melanoma Growth Stimulatory Activity Protein), VEGF (Vascular Endothelial Cell Growth Factor), Endothelin-1, MIP-3 beta (Macrophage Inflammatory Protein-3 beta; Exodus-3 or ELC), Beta-2 microglobulin, IL-5 (Interleukin-5), IL-1 alpha (Interleukin-1 alpha), EGF (Epidermal Growth Factor), Lymphotactin (XCL1), GM-CSF (Granulocyte Macrophage-Colony Stimulating Factor), MIP-1gamma (Macrophage Inflammatory Protein-1 gamma; CCL4), IL-1beta (Interleukin-1 beta), Brain-derived neutrophic factor, Cancer antigen 19-9, Carcinoembryonic antigen, C reactive protein, EGF, Fatty acid binding protein, Factor VII, Growth hormone, IL-1 alpha, IL-1 beta, IL-1 ra, IL-7, IL-8, MDC, Prostatic acid phosphatase, Prostate specific antigen, Stem cell factor, Tissue factor, TNF-alpha, VEGF, Von Willebrand factor, IgA (Immunoglobulin A), Haptoglobin, MIP-2 (Macrophage Inflammatory Protein-2), IL-17 (Interleukin-17), SGOT (Serum Glutamic-Oxaloacetic Transaminase), IP-10 (Inducible Protein-10), IL-10, FGF-9 (Fibroblast Growth Factor-9), M-CSF (Macrophage-Colony Stimulating Factor), IL-4 (Interleukin-4), IL-3 (Interleukin-3), TPO (Thrombopoietin), SCF (Stem Cell Factor), LIF (Leukemia Inhibitory Factor), IL-2 (Interleukin-2), VCAM-1 (Vascular Cell Adhesion Molecule-1; CD106) and TNF alpha and OSM (Oncostatin M).

71. The combination of claim 70, wherein the reagent is a nucleic acid probe that hybridizes to nucleic acid encoding a marker under sufficient stringency to determine expression of the marker.

72. The combination of claim 70 that is packaged as a kit.
